United States Patent Application Publication US 2003/0077808 A1 - sequence listing, part 6

SEQ ID NO: 10076 - DNA, 3923 bp, Homo sapiens
agaaggtcagtgtgcttgcttggagatcaggacgcaaaggtaagagcgcctcagtcgccacagaaatccggagtccctaacggaggggaaggctgtcgtagatagatattctcacaggaaaattgtatttgtgccaagagaactgcacgcaaccttgaagggagggggtaggtgtggaggaggggagggaggacgatactagagaacttgaaagaagcctccctttggagttgctaatgcggcgatggaagggtttggctctgaatcattggagggctgtggtttacgataggattttggcacggaggaaaacgtaggaagtgtatttttaaagtaattaaatcagtacggaaagccaaaatatttctgacagtgcccctttatctgttattgtcgcctttccttaattatttattttccttttcattagaacattttcaaatataacacagaaatagataacaacctgcgcgcagtagcaaacccctccctgcaccgcccccaccatcacgcacgcgcgcgcgcccgccgtggctctcaccagtcccgacgccaggggcgcacgcctgcgcaaacacagcacctcccgagccacgagggccgctcacacagcaaccccagcaccacgcgagcctgcccgcgcactaacacactggccttaatgccttgcgcccgttgcactcacgaccctcacttgcaaacacagcagaacccccactgcgccttttttttccgtgttcggggagttgcgccacaggactgggggcgtggccccagatttgacctcgcgcttccccactcgcgggaaccttagctcatttccgcctatcctatttccgcaggccacgtagacacttcctctcccagtggggggggaaaaaaaccacaaacccataatgcctccctgcaggaaaaaaaaaaaaaaggaaaaggaaaaaaaaaaaccctctggtcagaggaactctgggtcgtgaaataggccacgtgaacattctgccctgtagacttatgacccaacggctgtcacgcttttggagggcgggctaaaaaaaaaaacctaagagggcgaacgtcattggccggaactcgtactaacggaggaagaggattggtttgctgtagaccttaacagtgaagaagcaggttgctagcacccgcctttactgcggcgaagtgtcattgctgacgtgggggtggttgtccaatcatttgattatggaacattctaaaacttagacaagacgattgtgattggctgaagggcatacgccctcctccagggtgacgtgtctgcctatggatatcagttgccagagaaacctggctttactatggcggttggaggaacggcagtgatcacacgtcggctgctgggaagatctggattctcgtttcaggtttcggggtgggggtggggagaaagggtcgatgatttccttttttcgtcgggtatagacgggattacctagtgccttcacaatcggtcagagctggattcagattcctgctcgccaacgcccagcttgggcaaggctcctgttctttctgtgtctcggtttccatgtttgtaaaatggtgataataatagtatctacctcagagacgtgtactgtataatagtgcgtataaggcacgtaatgtgaagcctggcccctgaagatattagctattgttatggagataaataatacgcgtaatagaatgagaaaaattataaattatataaattcgctaattgtagtgccctttctgccatcaacttctttcctagaataaattaaagataaaatagatataccaatttttaccaatgaaataatttgttatttgggaattgcctcaaaatagcagagattgtaattttcctatattgaaaagttaaataaaaggtggggggggggggagtgcaagaaagaaagagatggagaacgagagcgagctggagatgaaccacatgcgatgagtaggccttgtttggatcctgaatcgaacacaccaactgtaaaaatatgtttaagacgcatcgggaaaattgggacacggattcgatatttgatgttttttagggaattgatgtcagtttttttaggcgtcacagtagtattgtgattatgttttcaaattgtccttttttgtagagacatacgaaaatatttacggattaaataatgtctgggattggcttctaaatacattaatgactaggatttgcttcaaaataatctcagcggtagggggaaatggggaggggtatagatgaaacaaaattggccctaaattaataatatttttttgctgagtgataggcagtgggttgcgtatattaatctgctttccttggtatacgtttaaatttttctataataaaatacagaagtcagatattccggtgagcttgaaaaagtcgggggtgggggggagcagtgggtggggttatagatgaaacaagatggccttcagttggtaattgttgaaagctggatgatggattcgtgtaggtttataatactatttcttttttatttcatccatttgaaattatatttaaggaaagttaaaaaacaaatttgtcagaaattatacaaatgtacaataaattaaatttgaaaatgtggccacaagaaaggaaaaagaaacacttgtacattatttatcagctttggtgtcctttgtgtgtgatgaaattgcattggctgatgtagaagaaagccatatctcatatctttttattttatgttctttcttgtccttttgtttgaccttctaggtcaccatcagaaaagctaagtttgctgtatagtgaggatcaggagatctgatcctgattgcagaaccttccctgattacagaatcttgggtaagtgcctcccttctgtcctcagttctcaaacaggataataccacataaccttcctaactgtccaggaatattttgaaaattaataagctcctatctgggaaagtagtctaaattctgagaagggaagggtggagctaagtccattgatagttccagtatagaaagtgcataagcaacagagggctttgtaatcttacatcccttgataaaagatactacagtcaatctcctgtagtagttccacagttccatagattacatttttccttggagcatcctatatgcagcatagtttagtggttaagagcaaatacttcctgaatttaaatcctggctctgccacttaactatgtgatcttgggcaagatatttactcactttatacctaagttcctcgtatatgaaacagaggtgataataatagttcctacttcataggattgttgagaggattacatgtaaagtaccaggacagtgcatggcacatgtaagtatttgctttaataataattatggttctgttagtcctgataatctcatgttttatctacacatttacacctacttctaaaagcagtggatatatttctttttggaattgtgtaaaaaaaaaataataattaataccgttggtttctctcctcattttccagaagcagcagttaccactagaactgaattccgaaattatgacttctggcttgtcttaacaatctagaaaggtttcaaatatattgatcatatttatttatgagggaatttccaggagctataattttagctagcagttcaaaccaaatttataaataagcaaatcttttcactgaatattcagtctgctaacagcttttgtatcattcctcctttgtctcagacttaaaaaaaaaaaatctattacatgtaatggaaatgtttcaagatccagaagagaaaattgatatgaatgtaactgatatggtatatgtgcatttaaaggtttattccaacaaaatgttactcacactcttttctgacacatgcatacacaaaagatgttagcatttgcagtctgattcccaaatgg

SEQ ID NO: 10077 - DNA, 2714 bp, Homo sapiens
ccacaactagaagtttgtaaaaactatttttcttgtcgtggacacgtgaagagttctgtttgcaccctcagcctgggccaaataatcatctttatttaaaaacaaaacagaacaaacaaaccaaaaaaccctcaaaagcacaaagaggcagaaagcggctggtaaacctggttaaaagaccaaagttcagaaagtgcatgggagagggacgctgagctgcggacaccgttccggctgcagtacgtgttatggctgaggttacacttgggtgactcagggatgcaggcagatgaacattaaccacactaacagaggagaaagaagcccactggggctgtgcaaagtgtccaaggagcacagccccttttgccctgatcagatgtaacagcccctcgcttgagatctgactgggcaacatggcaaaaccttgtctctacaaaaagtcaaaatttagccaggcctgtggtcccagcttctcagggagctgaggtgggaggatcgcttgagcctgggaggtgagaggctgcagtgagccatgattgcatcactgcactccagactgggtatgatgctccagacagcaaaaccctgcctcacaaaaataaataaactaaaaagaagtaacagcccctcctggacttgttttattttttgagatggagtcttgctctgtcacccaggctggagtgcagtggtgcagtctcggctcactgcaacctctgccttctgggttcaagcaattctcctgcctcagcctcctgagtagctggcactacaggcacacgaaaccacatccaactattttttttttttttgtatatttagtagaaacagggtttcaccatgttggccaggctggtctcaaactcctgacctcaggtgatctgcccaccttggtctcccaaagtgctgggattacaggcgtgagccactgcgcctggccccctcctggacttttaggatgtgacttccttcccatccagcctttctgtctgagcactacccacccagctagactgacttggtaactggatctaagaaggaggcgatattgctgttttcgaggtcgatgggccaggggcctgggctaaggcacttagacaagcccctgccctgcccacctggtcaccaccattcacagtgatcactcatctgtggcaagaggtgggcagcggaggaagctgactagagatacctgatgtataactttttggaggtttttacaaaagcagatacagtggccagtggcatcaaagaaatggaatgagaacttgagcccaggcacccggagcaggtattttctgagccctcagctccctctacaggcctttcctgaccacagccagtccatctggggagccatgtctcagctctggcttgggtacagcagggagggctccagaggcccctgctgagcagggttgatcctaacactattcctctgtggcctatattgtcttttctcttttacctgttaatcatgttctcttttgcagcaagcaaattcctgaattttcgctcccttctagaagctcaagtgagggtctttaccagagacatacccagagatttgctgtaacgtcttcaggggaatccagaattcacttacagaggctatttctgccaagtggctttccctggagcagcccagagctctctttcaatcctaaggggatgtctgtctcactaatttccatcaagaaatctgttttcttggacaggcacagtggctcatgcctgcaatcgaagcattttgggaggctgaggtgggtggatcacctgaggtcaggagttcgagaccagcctggccaacatggtgaaaacccgtctctactgaaaatacaaaaaattagccgagcatggtggcgcatgcctgtaatcccagcagcttgggattgggaagcaggagaatcgcttgaacctgggaggcggtggttgcagtgagtcaaaattgcaccactgcactccagcctgggcaatagagtgagactccatctcaaaaaaaaaaaaaaaaaaaaagaaagcgacaaaaagaaatccattttcacaggaaaccaaaaatgagcattttggactcagtctgctaaatgattattcctttcctgaatacagattttggttttgagagtcaaacagggatcggcagcacagcgtgacttcggttttgattcagaaccattttactaggctcagaaaatcatgctttgtcgagttctgatggattccaagggaaatcacctatcaggtaaagctgtactttctctcaccaagaccctggaggtagcatttccacttccattctttgccgatggctcctgtgactgaacacagaagctgttttctgaaataagacgaaagcgtttgtggaagacccacagaataaaaatagagatacaggtgcttactttcaattcttttcttttaaatgtaaataatcgctccatgctccatgccgccacttacctcagctgaatacaaaacagctgaatccttttgaatcctttgtttttttctttttttgagacagggtcctgctgttgcccaggctggagtggcagtggtgccatcccagttcaatgaagcctcaaatccctgggctcaagggatcctcccgtctcagcctcctgagtagtagggactacaggcacgcaccaccacatcagctccgggcgacagaatgaggctccttttttaaaaaaaaaaaaaaaaaaaaa

SEQ ID NO: 10078 - DNA, 908 bp, Homo sapiens
ctggccaacatggtgaaaacccgtctctactgaaaatacaaaaaattagccgagcatggtggcgcatgcctgtaatcccagcagcttgggattgggaagcaggagaatcgcttgaacctgggaggcggtggttgcagtgagtcaaaattgcaccactgcactccagcctgggcaatagagtgagactccatctcaaaaaaaaaaaaaaaaaaaagaaagcgacaaaaagaaatccattttcacaggaaaccaaaaatgagcattttggactcagtctgctaaatgattattcctttcctgatacagattttggttttgagagtcaaacagggatcggcagcacagcgtgacttcggttttgattcagaaccattttactaggctcagaaaatcatgctttgtcgagttctgatggattccaagggaaatcacctatcaggtaaagctgtactttctctcaccaagaccctggaggtagcatttccacttccattctttgccgatggctcctgtgactgaacacagaagctgttttctgaaataagacgaaagcgtttgtggaagacccacagaataaaaatagagatacaggtgcttactttcaattcttttcttttaaatgtaaataatcgctccatgctccatgccgccacttacctcagctgaatacaaaacagctgaatccttttgaatcctttgtttttttctttttttgagacagggtcctgctgttgcccaggctggagtggcagtggtgccatcccagttcaatgaagcctcaaatccctgggctcaagggatcctcccatctcagcctcctgagtagtagggactacaggcacgcaccaccacatcagctccgggcgacagaatgaggctcctttttaaaaaaaaaaaaaaaaaaaaaa

SEQ ID NO: 10079 - DNA, 112 bp, Homo sapiens
tttgtttgagaccgagtttcactcttgttgcccaggctggagtgcaatggtgtggtcttggctcaccgcaacctccgcctcccaggttcaagagattctcctgcctcagcct

SEQ ID NO: 10080 - DNA, 112 bp, Homo sapiens; identical to SEQ ID NO: 10079

SEQ ID NO: 10081 - DNA, 703 bp, Homo sapiens
agcctttctgtggacaactacccacgcagctagacttacttggtaactggatctaagaaggaggcgatattgctgttttcgaggtccgatggccaggggcctgggctaaggcacttagacaagcccctgccctgccacctggtcaccaccattcacagtgatcactcatctgtggcaagaggtgggcagcggaggaagctgactagagatacctgatgtataactttttggaggttttacaaaagcagatacagtggccagtggcatcaaagaaatggaatgagaacttgagcccaggcacccggagcaggtattttctgagccctcagctccctctacaggcctttcctgaccacagccagtccatctggggagccatgtctcagctctggcttgggtacagcagggaggctccagaggcccatgctgagcagggttgatcctaacactattcctctgtggcctatattgtcttttctcttttacctgttaatcatgttctcttttgcagcaagcaaattcctgaattttcgctcccttctagaagctcaagtgagggtctttaccagagacatacccagagatttgctgtaacgtcttcaggggaatccagaattcacttacagaggctatttctgccaagtggctttccctggagcagcccagagctctctttcaatcctaaggggatgtctgtctcact

SEQ ID NO: 10082 - DNA, 7458 bp, Homo sapiens; identical to SEQ ID NO: 9489

SEQ ID NO: 10083 - DNA, 487 bp, Homo sapiens; identical to SEQ ID NO: 9488

SEQ ID NO: 10084 - DNA, 996 bp, Homo sapiens
cccttcagcctggctggctctccagccatctcggaaagcttctctttcctaaaccctccatactcgcaggttcagctacagaggtaactgcaggctcaggttctccagggtggccagcccaccagcccaccgtcccggtgcagcagtgcctctccagcgacagctccaccgcgagcctggcgggctcccgaccttgctccccagcacgtcgtctccaagccacggtctcaccaccctccatcagcctcgggcgacaccaaggggaacagagcgctggagctcctcgaagtcctcccgaccttagcggggctccgttcatcctcccggacgtggccaggccccgctctggccccgcgcccgcccctcccgcggggctgcccctgtctctctgccggagacccggactcagtgagtgagcgcagcgcggccatagggcttcctgcagcggggtctcagcacgtcttctggctggactctggggtctcctggcctggctgtgtctcctggttctcagcgctcgcctcccacgcggggcgggagtatgggagtgggctgctcccgcgaagaatcctggggaagttgaggcactggctcccgctgttcagaacactgcccgacgtccccagagctagccactcctccttcccacccacccgcagcactctcgaggtcgcaacggcagtcaccaggtcccggggcctgcgttcagctgcttgatccgactaggtttggcttcggacccgaatgggtcagctccacgcccgatggagtttttcaagctggtgcctgcacgtgcccccgccgcggggcatgaagccgcgtggcgcccaaactgcctcacaaccaccgctgacccgaagcctctctcactccgtccactgttagaaacctgaagctgccctctgtgagaaagcgttgggattgaatccagacttttggggaaccttaacaataaagaatacaaaatattgactaaaaattggatttgaaagtgac

SEQ ID NO: 10085 - DNA, 112 bp, Homo sapiens
cctgtaatcccaacactttgggaggtcgaggcaggtggatcacctgaggtcatgactttgagaccagcttggccaacatggtgaaaccccgtctccactaaaaatacaaaaa

SEQ ID NO: 10086 - DNA, 354 bp, Homo sapiens
agagaacccaggtggacattctttccagccaaagactcaatacttctggaaagattaaggtcacatttgtttcaagagtgtccagtacaacaaagaccttccacagggagtagtaactattcctgatagggaacctccaaactgcaataggctttacccttttttatctttcctctttcttcgtgcctcaagtcagatcatagcaagaagaaaccttggaaaatcccctcttctcctccacacctcccagagatgcccaaaaagcagtttaatgctttttcgtagacttagaaaacagttctgttcttccctgggctcagagaagcctcccattttggagctcttatcttcaaa

SEQ ID NO: 10087 - DNA, 151 bp, Homo sapiens
ggcgtgatggcaggcacctgcagtcccagctactcaggaggctgaggcaggagaatggcatgaacccgggaggtggagcttgcagtgagctgagattgcgccactgcactccagcctgggcgacagagcgaggctccatctccaaaaaaaa

SEQ ID NO: 10088 - DNA, 1374 bp, Homo sapiens
tcagccacggatagagtgattgcaacatacaggatcagctcaggcatcacagcgccgcctgccagggctgtggcggtatccggccggttgctccacctggcgttcgagaggagaaactacagggagcgccgactgcagaaatgaggccaactccgcggagtaagccgatccgtaacgtggactgcggtttggtctgtaccgcgtttgggatctcggacttgcgtcccctttccgagcatgcgcagtcgtcacactgccaaaacaaaactcctactcagaattcagtgttaacatacggtcgggattggggttcagtgcctaaaatgcagcaggaggaagatcttgggagtcctgctttctgtcgcgccgggactctggcatcactggatggcaaaccggctccatgggcgaatagtcagcaaaatgccgcagctgcttctggtggcttcgccctttcccccactccccgtttcctcctttccattccggtgataaaccatgagagaagcagcatcagcgagccagaagatagggttaaatatgatccgaatccctctttcctggctcctgggacagtctaggaataacgggcacctgcgacccgctgtaaggttgcgaggtcactccaggcttgcccgagcctctgctcaggtttcaactacgcgagttgggataagcagcgccctcccctcccgcccccatgctctcctgaacgtgggttttctctcccctttcgctcgcccttcccctgatggaaggaggtgggggaggcttcctggccctcatctttcctaggcctccttgtctcccagacaggacctgccctgccctttggaacagggcgacaaggcctatccagttccaaacccctgccgtccctgcatcgtgcttgaacgcagcacgagaaagacgggaaaagctcaccaaaccccataaaaaataaaaaataaaaagaaagccgcggctgtaaataaaggcaaatccgccactctctgaggggccgtttgtcctcccctccttggccccgtccttcccgccgccccctcccggctcccgggccccgcggcgccccggccccgagctcctccatttaatcggatttgggagaaggggaggataaatcacggcagcagctttacggtcccggaggagaggcgagccgcagacaggcacaccccggccggcgataaaaaccgccgctgaaagcccacggagcaatttcccgggaccccgagcgacgccattacaggaatgtaattttgcccggatgaggcccgagtttaattatcctcgcggaggaatttcaatgcggccaatccatcttgcaggcgggcggcagagggatttatatgggcccgttatttcacaccgatc

SEQ ID NO: 10089 - DNA, 1375 bp, Homo sapiens
tcagccacggatagagtgattgcaacatacaggatcagctcaggcatcacagcgccgcctgccagggctgtggcggtatccggccggttgctccacctggcgttcgagaggagaaactacagggagcgccgactgcagaaatgaggccaactccgcggagtaagccgatccgtaacgtggactgcggtttggtctgtaccgcgtttgggatctcggacttgcgtcccctttccgagcatgcgcagtcgtcacactgccaaaacaaaactcctactcagaattcagtgttaacatacggtcgggattggggttcagtgcctaaaatgcagcaggaggaagatcttgggagtcctgctttctgtcgcgccgggactctggcatcactggatggcaaaccggctccatgggcgaatagtcagcaaaatgccgcagctgcttctggtggcttcgccctttcccccactccccgtttcctcctttccattccggtgataaaccatgagagaagcagcatcagcgagccagaagatagggttaaatatgatccgaatccctctttcctggctcctgggacagtctaggaataacgggcacctgcgacccgctgtaaggttgcgaggtcactccaggcttgcccgagcctctgctcaggtttcaactacgcgagttgggataagcagcgccctcccctcccgcccccatgctctcctgaacgtgggttttctctcccctttcgctcgcccttcccctgatggaaggaggtgggggaggcttcctggccctcatctttcctaggcctccttgtctcccagacaggacctgccctgccctttggaacagggcgacaaggcctatccagttccaaacccctgccgtccctgcatcgtgcttgaacgcagcacgagaaagacgggaaaagctcaccaaaccccataaaaaataaaaaataaaaagaaagccgcggctgtaaataaaggcaaatccgccactctctgaggggccgtttgtcctcccctccttggccccgtccttcccgccgccccctcccggctcccgggccccgcggcgccccggccccgagctcctccatttaatcggatttgggagaaggggaggataaatcacggcagcagctttacggtcccggaggagaggcgagccgcagacaggcacaccccggccggcgataaaaaccgccgctgaaagcccacggagcaatttcccgggaccccgagcgacgccattacaggaatgtaattttgcccggatgaggccccgagtttaattatcctcgcggaggaatttcaatgcggccaatccatcttgcaggcgggcggcagagggatttatatgggcccgttatttcacaccgatc

SEQ ID NO: 10090 - DNA, 1375 bp, Homo sapiens
tcagccacggatagagtgattgcaacatacaggatcagctcaggcatcacagcgccgcctgccagggctgtggcggtatccggccggttgctccacctggcgttcgagaggagaaactacagggagcgccgactgcagaaatgaggccaactccgcggagtaagccgatccgtaacgtggactgcggtttggtctgtaccgcgtttgggatctcggacttgcgtcccctttccgagcatgcgcagtcgtcacactgccaaaacaaaactcctactcagaattcagtgttaacatacggtcgggattggggttcagtgcctaaaatgcagcaggaggaagatcttgggagtcctgctgtctgtcgcgccgggactctggcatcactggatggcaaaccggctccatgggcgaatagtcagcaaaatgccgcagctgcttctggtggcttcgccctttcccccactccccgtttcctcctttccattccggtgataaaccatgagagaagcagcatcagcgagccagaagatagggttaaatatgatccgaatccctctttcctggctcctgggacagtctaggaataacgggcacctgcgacccgctgtaaggttgcgaggtcactccaggcttgcccgagcctctgctcaggtttcaactacgcgagttgggataagcagcgccctcccctcccgcccccatgctctcctgaacgtgggttttctctcccctttcgctcgcccttcccctgatggaaggaggtgggggaggcttcctggccctcatctttcctaggcctccttgtctcccagacaggacctgccctgccctttggaacagggcgacaaggcctatccagttccaaacccctgccgtccctgcatcgtgcttgaacgcagcacgagaaagacgggaaaagctcaccaaaccccataaaaaataaaaaataaaaagaaagccgcggctgtaaataaaggcaaatccgccactctctgaggggccgtttgtcctcccctccttggccccgtccttcccgccgccccctcccggctcccgggccccgcggcgccccggccccgagctcctccatttaatcggatttgggagaaggggaggataaatcacggcagcagctttacggtcccggaggagaggcgagccgcagacaggcacaccccggccggcgataaaaaccgccgctgaaagcccacggagcaatttcccgggaccccgagcgacgccattacaggaatgtaattttgcccggatgaggccccgagtttaattatcctcgcggaggaatttcaatgcggccaatccatcttgcaggcgggcggcagagggatttatatgggcccgttatttcacaccgatc

SEQ ID NO: 10091 - DNA, 555 bp, Homo sapiens
tttttttcccacttctaccatgttcaaggtttactttttaaattgaggggtgctgactagagggattggtgactttagacgatccactatctccattgctcggagcacctgaggttctggggcctaaagtctggagatttcagaataaagaaggcacaagtcaggatgagaagagaaagcagagataggaggggagagcctgggggttgtcacaatctgaaagggccagagggcgagaaaagagtgtttgcagggactgggtggaacaggtgaaaagcagcactccaggatctaactttggccagctccaaggtatcctccccctgcgagacagccaagatggcgccaggcccgcgcggttggaggtcaccggcacgcggaagagccaactctaaggctaagggatagcggaagcaagaaagggcgagaggaccagggtgggagcacgcaaggtaagcgcctcaaagcatccgcgcaaggtgaggtgtcaccgcgcgcgtgcgcagcgcacagagggctctaggtcccaaggccttacctgctcccactgcagag

SEQ ID NO: 10092 - DNA, 554 bp, Homo sapiens
tttttttcccacttctaccatgttcaaggtttactttttaaattgaggggtgctgactagagggattggtgactttagacgatccactatctccattgctcggagcacctgaggttctggggcctaaagtctggagatttcagaataaagaaggcacaagtcaggatgagaagagaaagcagagataggaggggagagcctgggggttgtcacaatctgaaagggccagagggcgagaaaagagtgtttgcagggactgggtggaacaggtgaaaagcagcactccaggatctaactttggccagctccaaggtatcctccccctgcgagacatccaagatggcgccaggcccgcgcggttggaggtcaccggcacgcggaagagccaactctaaggctaagggatagcggaagcaagaaagggcgagaggaccagggtgggagcacgcaaggtaagcgcctcaaagcatccgcgcaaggtgaggtgtcccgcgcgcgtgcgcagcgcacagagggctctaggtcccaaggccttacctgctcccactgcagag

SEQ ID NO: 10093 - DNA, 554 bp, Homo sapiens; identical to SEQ ID NO: 10092

SEQ ID NO: 10094 - DNA, 682 bp, Homo sapiens
tggactcgtgctcccttcaagtcccagctggccccaggcttcagggcttgaactgaggtggtggcatttagcaggcattgctggtagaggagggtgtcgctaatggggccacacttgggccaaactaaaaatcttgaggacaagggatactgtctataagttgtggccacgctgacattagaagaaattagttccatattcccagaccctgaatactgcatggttaaatcaaggcaggtgggcaaaaaattacagaagtccttgcttggtggttccactgggctggggctgtaggcacttttgtaggaattgtagtcaggtccaggcaccatgcggttgggcagaaacagagcagcagcttgagaagtttccaacatctccctttctttatattctctctccagcataatgttctccaactctttatcagcaaaggctcttcttttcctcatcctgtcactaactgggggaggtagagggaaggtccctcctacataagtctccgctggaatggggcgatagcctacaagaagcaaagattgcacatgaaagagattaacatctacggaataaaaatgtggaaacccagaaggtaacagcaacactacagatcagcagaacaattatttacagttccatctcactgatatttttatacagatgcaaaagtacagattaggtt

SEQ ID NO: 10095 - DNA, 682 bp, Homo sapiens; identical to SEQ ID NO: 10094

SEQ ID NO: 10096 - DNA, 2237 bp, Homo sapiens
ggatttgtttgcttgcttgcttcaacagacatactttattgattaaaattttaatattcttcccaggccccctacgcattaagagacaagactatttatcttgtatcaatcaatgttttattattatccatgtcatcttttttcattattaaaaaatatatctatacctagagctgatgtcacttttattttctaaagatggttcattatgtacacataatagctgtagaataatccaaggagaactaggaaaaaagagaaagaaagaaagttaaaggagattagcgagtagaaaaagaaaaaaaaggcttaagaaaatagagaagcatagaaaattgaaaagagctgttaactagtcaaacacactctacagtgaacaatttaaccaggccccttcccctgataccactacaaaaaaaaataaaataaaataaaacaaaactcaaaaaaggcggggagtattccctgctctatcgaaaataactgttctgaaacattcttcccaagctctaatcattttggccggataccaaaatggttgaacaagcaatcattaaaacacaggctaagtcatcgcacgaataggagcaaactcaaatacaaagattagtgtaacataaatagaattcctggaggcataaaatacttggagtatttcatcacccccaagcactcacctctgtcatatttgtttgaagcatccattgttatatttgtgtttacatagtgacaaacccattatactcatttgcaaataaaataaaatttgaaaattaatgtttacatttctatgataagtttttgccaggaagttatttagttgaatttactattccatttagtcctcagacttcacaagttgctttgcataatctcagtttatcaatgtggccctattattataaatctgtttatccagtttgtaaccaaattcatttttaattcataagaaaccactctatggtcagaagtatacaacacatgataggacacacacaaacttcaaaacctgtccagaaccaacaaaattcagaagctacacaagaaaaaaacagaatccaaatgtctacttaaaaatttttataggacacacacaaacctgtccagaaccaacaaaattcagaagctacacaagaaaaaaacagaatccaaatgtctacttaaaaatttttgtttactttcaacctgaatttcatgaagtggcagtgattaaagcaaacattaattgtcccttatttaaatttttaaaaatttaaagagaaacggttaaaaatagtcaatatattattgaggtcaataaataaattccatacccaaatagagatgcttttaaaaatgagtaatattttaagaaaaattaatgtacccccaggctttcacgaaagtgagaacatggagacagaaagctagagatttcgcactgttcgcattcaacctccacttcgcttgctggattcgaaacctttttcagattctataaccttgactgtcaaaaaatggtaaaaatgaagtttggaataataggaattatccaagtaatccaaaaaaaaaaaaaaaagtacaatgaaaaagagcggaatctgaggttgaacttccagactaaacggctttactggttgcgagcagctgttaaactcctcacttgacttcatctattcagctcccacaactaagaaaagtggacgtggttgtgttgttttgttttgctttgtttaagttatttatttccttccaagacatctgctccaggatcacttggcagtatatctttgtacatccctcatacggggtaaatttcacatgcactccacattaaccgattaaccactaagcagacaaccaaataatagggattcttcaactggtggtgacagaaacctcaggaggtatgtgagattcattttcccaggtggcggtttccttcctagaagaaaactttctggttcccgggccatgctaatcttctccgtacgggttcagttttagcgtacgggctcagcgaacacctaaacaaaacctttctaataaaaagtactttccctttagatagctctttcacagattaataaacacactttgtgctgattaatgagagtcactcaactctgtttaaaaggctgaaggataattttgttgctttaccttctaaaatgcttttggccagcaaactgggggctctgacttgcctctggtacacagctttgcgctcgaaattattctgtttcccggaaagcccc

SEQ ID NO: 10097 - DNA, 689 bp, Homo sapiens
tttgcttcggcaaatattgggtctttgagaagacagtgtcaattttattgctttttgaaatgctgtgtaaagtgtggtacttaacaatttgcacattgggcaatttccatctgtaagtttaaatatatgtgataagaaaaagtacatgcatattaggaatatataaaatttttcaaaatcatcatctttacattagaaatttctttacacaaacatcttaacttttaaaaaaagtagcaaatggctataatgctctaagactgcagaaaatccagctttctgtttaagcagcctttcactgagagacacgagtgatggcagatgaaggcctcttaagaatagactcaacagaaaatgacagtggttcattcaccgagagttttgttccaacttgtttggctacaaaaaggtcttttgcacatctatctattgtaaatgtgtacttctggttgtccttaactaaacactctctgtgtttcttaggggtctcttcaaaggcctctttgacaaatggtgttttcaactcaggacccgatttgtcagtaagtgtttgctggaataatgagtggaatggattatgtctaagtggcagagggtgcctggtttttctttgctgatcttcgttaagacatgcccttgagctgccagggagtccgtgtcaacaatgggagagaaattccgtcggggtg

SEQ ID NO: 10098 - DNA, 689 bp, Homo sapiens
tttgcttcggcaaatattgggtctttgagaagacagtgtcaattttattgctttttgaaatgctgtgtaaagtgtggtacttaacaatttgcacattgggcaatttccatctgtaagtttaaatatatgtgataagaaaaagtacatgcatattaggaatatataaaatttttcaaaatcatcatctttacattagaaatttctttacacaaacatcttaacttttaaaaaaagtagcaaatggctataatgctctaagactgcagaaaatccagctttctgtttaagcagcctttcactgagagacacgagtgatggcagatgaaggcctcttaagaatagactcaacagaaaatgacagtggttcattcaccgagagttttgttccaacttgtttggctacaaaaaggtcttttgcacatctatctattgtaaatgtgtacttctggttgtccttaactaaacactctctgtgttcttaggggtctcttcaaaggcctctttgacaaatggtgttttcaactcaggacccgatttgtcagtaagtgtttgctggaataatgagtggaatggattatgtctaagtggcagagggtgcctggtgttttctttgctgatcttcgttaagacatgcccttgagctgccagggagtccgtgtcaacaatgggagagaaattccgtcggggtg

SEQ ID NO: 10099 - DNA, 2237 bp, Homo sapiens; identical to SEQ ID NO: 10096

SEQ ID NO: 10100 - DNA, 1337 bp, Homo sapiens
agccgcgcctatcatttccatatcgcctgtgcccgttctctgctgcagtggcagagctcagtagctgccaccgagaccagctggcccaagaagccgaaaatattaactctctggcccttcccacttcaaagcatcattcataaaacttcagtgtgatgtaggagaagataatcacgtcacattcatggcaagaaaaaatactcagatccaagtagactggcagcaaccaaacatgctgatgtgtggggctgttttctgtattttcttcagtggtctggcagttgtcccattttctagatgagaaaactgatcctcagaaaggtctccaggtgagtaatcagcgaggccagcattcaccattgactgcctcccttacagaaaaggataataacaacatttcagtttagtatgacctgatcctgtaggtggctttactgcaactgagagttgaactgaaggatctgcatttctttctttgacatctgaaaataaaggaaataaaactactgatattgaaagtaataaaaaatgaatatgaaatgatttttactgtcagttttttttgttttgttttgttttgttttttcacagagtcttgctgtgtcacccaggctggagtgcagtggcatggtctctgctcaccgcaagctccacctcccggattcacgccattctcctgcctcagcctcccgagtggctgagactacaagcgcccgccaccatgcctggctaattttgtttttgtatttttagtagacatggggtttcaccgtgttagcctggatggtctcgatctcccgacctcgtgatccgcccgcctcggcctcccaaagtgctgggattacaggcgtgagccaccatgcctggcccggttgttgtagtataaagtgcatgtcagtggcatgaagtggatgtgtaattcttcccctagcaccctcccagtgaggcaagccggcattgccattaagctgtttctgtggtttttctagcacgacttttatggtatggcaagtctcaaaaaaagaacttgtcgggaaaccatttctgaccattgctttcagcttaattaaccagtattagcaagaatgtaaaaggacagatcaggtgaactatcttaacaaataccaaaagtaaatgtctctatatggagggtaagatgtagacaaactcagacacaataaagaaatttaaagaggtgagtgggcagggcacagtggctcatgcctgtaatcccagcactttgggagactgaggtgggtggattggataaggctgggagtttgagaccagcctaggcaagatagtgagacccccatctctgaaaaaaagaaaaaaaa

SEQ ID NO: 10101 - DNA, 1338 bp, Homo sapiens
agccgcgcctatcatttccatatcgcctgtgcccgttctctgctgcagtggcagagctcagtagctgccaccgagaccagctggcccaagaagccgaaaatattaactctctggcccttcccacttcaaagcatcattcataaaacttcagtgtgatgtaggagaagataatcacgtcacattcatggcaagaaaaaatactcagatccaagtagactggcagcaaccaaacatgctgatgtgtggggctgttttctgtattttcttcagtggtctggcagttgtcccattttctagatgagaaaactgatcctcagaaaggtctccaggtgagtaatcagcgaggccagcattcaccattgactgcctcccttacagaaaaggataataacaacatttcagtttagtatgacctgatcctgtaggtggctttactgcaactgagagttgaactgaaggatctgcatttctttctttgacatctgaaaataaaggaaataaaactactgatattgaaagtaataaaaaatgaaaatgaaatgatttttactgtcagttttttttgttttgttttgttttgttttttcacagagtcttgctgtgtcacccaggctggagtgcagtggcatggtctctgctcaccgcaagctccacctcccggattcacgccattctcctgcctcagcctcccgagtggctgagactacaagcgcccgccaccatgcctggctaatgttgtttttgtatttttagtagacatggggtttcaccgtgttagcctggatggtctcgatctcccgacctcagtgatccgcccgcctcggcctcccaaagtgctgggattacaggcgtgagccaccatgcctggcccggttgttgtagtataaagtgcatgtcagtggcatgaagtggatgtgtaattcttcccctagcaccctcccagtgaggcaagccggcattgccattaagctgtttctgtggtttttctagcacgacttttatggtatggcaagtctcaaaaaaagaacttgtcgggaaaccatttctgaccattgctttctgcttaattaaccagtattagcaagaatgtaaaaggacagatcaggtgaactatcttaacaaataccaaaagtaaatgtctctatatggagggtaagatgtagacaaactcagacacaataaagaaatttaaagaggggagtgggcagggcacagtggctcatgcctgtaatcccagcactttgggagactgaggtgggtggattggataaggctgggagtttgagaccagcctaggcaagatagtgagacccccatctctgaaaaaaagaaaaaaaa

SEQ ID NO: 10102 - DNA, 126 bp, Homo sapiens
tttttttgtatttttagtagagacagggtttcgccatgttggccaggctggtctgaaactcctgacctcaagtgatccacccacctcagcctcccgaagtgctgggattacaggcgtgagccacca

SEQ ID NO: 10103 - DNA, 104 bp, Homo sapiens
aggctgaggcaggagaatagcttgaacccaggagttggaggttgcagtgagccaagattgcaccattgcactccagcctgggcaacagagcaagactttgtctc

SEQ ID NO: 10104 - DNA, 466 bp, Homo sapiens
ccccagcccaccgcccccacccaaagtgacatttgcttatgtgactctgactcacattatagttagaggaccgtgggttccaaaggtggttctcagccctgactggtcagtcaccagagtctcctctcagtgatcattcagtctatgcataaacacttccagtgacaggaagctctcagcctcccacagaggctcacgccaactttggaaatgctcctacacttaaatggttgttggatttgtttataaacctaccttcttgcaactttcacccacccatgctgtttctacttctgtggtgaatgatgcctctcacacatgtcagcatatcgggcttcctgcattatctcttcacccatagatccttaaaaccaaaagccttttgacgttgctttagaaaggaagtaaatcctaaggagctttgatgttgaagcaccccttagtcaggaaagctgaaaaatgtcag

SEQ ID NO: 10105 - DNA, 676 bp, Homo sapiens
tgtcaccattttgaaactcaaatactcaggttgcctttacaaccgaaagatagtagcacactactaccccctggtggcagcatgcccaaggtgtaggatcaatacctgggaagtaaaataccactaatgtatatgcaagctctaaaagcaaaggcataactatttaaagatctaaactcagcttcaatttgtggtctagacaactaatctatattaaattcaatgtgacacatgtattacaaaattcatctacattattgcaaataaaatgtcaaaaataacataatcccattaaaaagtaggcaaaggacataaataggcatttttcaaaagaagacaaatggctaagaatcaaatgaaaaaagttcatcactaatcagagaaatgcaaattaaaaccacaatgatatatcattttataccagtcagaatagctattattaaaaagataaaaaataagatgttggcggagtgctgagtaaagggaacacttatacattgttgctaggaatgtgattggtacaagctctatggaaaacagcatggatatttctcaaagaactaaaaatagaactactaatccatctggcaatcctactattggctatatacccaagaaaaagaaatcatatccaaaagatacctgcgctcatatgtttattgcaacactattcaca

SEQ ID NO: 10106 - DNA, 2485 bp, Homo sapiens
atttttcatgtcacataattttggagtatgtcatggacatttgaatattttgttacaaaactggatgctgttaaaatcctctggaaaatatttttggttttttggtttcactttagcgggcagttaacctggttaggttcagactgcctctgtgggctgtggatccagtttgaacttacttttcaaaaccttcgtattgctgttcaggtcccaggtgtgccatccatgccattgtgcagttctcaacgcctttcctctgccgccttgggtcagttcacacatgggcatgttggtggtaaacttgagattgtatacacaaatttagaggacgtttcttctctccgtgacttcccttgtacacaagctcccaagagtttcttttcgtggttctttggtgagaaaactggaattttagcttctttgtgcttttcatacgttttctgtagaggggctcatttcctgaacaaaatggagagagagaaaagttagagaaaaaaataaaatgaattccctcttccatactcttccgatcatcgtctttttcctagttcttttgtcagaagaactctcttttagagtttaggagacagctaccagccacaggtgtgcagactcaggattggggcttgctttgaggcagagctgagagagaagaaaaattaccagatatccacccctccccattgtccctctcccattcatcatcttttctagttctctagccagaaggagtttctcttggaacttttctctgtcttcactcactgcacagttaatgagatttgggctgtcctcaagtctaagctgacatatgtgggagaaaaaaaccaggaaactcactactgttttgagttttgatttctctcgccagtctgcttgcttcaaattacttttcagagtccttgtatatttgctttatgtattctttccaggatttttagtaataatcaatggacaagatagggtggagtgtgctttctccatcttagctagaactgggaccccgtcccccactcgtaaaatataaataatgacttagcatggcacattaggtgggcattagagacaccagggaagcgattacaaatataatgcccaggttgtatctccagataattaaaaatctttcaggagtaggatccagaaaactatatttaaaagttctctaggttcttgatatactatgtaggttgtggtctgaggaccactacatggggatcatttggaaacttgttagaaatgtagactcaggttccattccagacctgctgaattggaacaagatccccagatggtgcctacgcacagtaaaatttgagcagcactgccctagcatgattctagtgtgcagtcaatgttgaggaccactgtcttagaggattgcgtaaaagcaaatgacgtgtatataaatttagattgtaatattctctgagtataaactcattaggtgcaagctgagctcaccctccatgttttctgtgttcctggttaaagtaagttacctttgatgaaaaccacaggttcatctttgacttcaaatcagatttgttgctattgaagctaattggatcccagctcagctttgtggcttggattcacaccatataaaatcttcaacagacattcattcctttgttcagaacacacaaccttctaacgtgaacctccaattttctaaattcattctttttctacttcacctgaaaccacagatccatggcacttagtttctctgtaacagcagctctaccatggtgtccagaaattttagcccctactatcaagaacaaaacatccttgtacatgtttatacatctttttgagtaggagttttccaccagttgcagggattccctgagtctagagtaatgccacaatgctgctcccttttactcctttctaagcatttctgtcagggagaagacttagattcagttgttcactttaacattttccttagatactctcttagaaaagttgtattctgcgcacttctgttatgaagggagtaagggattgctgagatttgttaagttaccaaactagtcttgatagatgtataattattacatatccaccatcacttcatttagctgggcaagtattatcagtttggttcatgttagctaattaggtcactggtttgttcctaggacagtgttgggctggtcatataagttagaagcacctgggagctgggcatggtggctcacgcctgtaatcccagcactttgggaggccgagcgggcggatcatgaggtcaggagatcgagatcatcctggctgacagagtgaaaccccgtctctactaaaaatacaaaaaaaattagctgggcatggtggtgggcacctgtagtcccagctacttgggaggctgaggcaggagaatggtgtgaacctgggaggcggagcttgcagtgagctgagatggcgccactgcactccagcctgggcgacagagcgagaactccatctcaaaaaaaaa

SEQ ID NO: 10107 - DNA, 2689 bp, Homo sapiens
atttttcatgtcacataattttggagtatgtcatggacatttgaatattttgttacaaaactggatgctgttaaaatcctctggaaaatatttttggttttttggtttcactttagcgggcagttaacctggttaggttcagactgcctctgtgggctgtggatccagtttgaacttacttttcaaaaccttcgtattgctgttcaggtcccaggtgtgccatccatgccattgtgcagttctcaacgcctttcctctgccgccttgggtcagttcacacatgggcatgttggtggtaaacttgagattgtatacacaaatttagaggacgtttcttctctccgtgacttcccttgtacacaagctcccaagagtttcttttcgtggttctttggtgagaaaactggaattttagcttctttgtgcttttcatacgttttctgtagaggggctcatttcctgaacaaaatggagagagagaaaagttagagaaaaaaataaaatgaattccctcttccatactcttccgatcatcgtctttttcctagttcttttgtcagaagaactctcttttagagtttaggagacagctaccagccacaggtgtgcagactcaggattggggcttgctttgaggcagagctgagagagaagaaaaattaccagatatccacccctccccattgtccctctcccattcatcatcttttctagttctctagccagaaggagtttctcttggaacttttctctgtcttcactcactgcacagttaatgagatttgggctgtcctcaagtctaagctgacatatgtgggagaaaaaaaccaggaaactcactactgttttgagttttgatttctctcgccagtctgcttgcttcaaattacttttcagagtccttgtatatttgctttatgtattctttccaggatttttagtaataatcaatggacaagatagggtggagtgtgctttctccatcttagctagaactgggaccccgtcccccactcgtaaaatataaataatgacttagcatggcacattaggtgggcattagagacaccagggaagcgattcaaatataaatgcccaggtgtatctccagataattaaaaatctttcaggagtaggatccagaaaactatatttaaaagttctctaggttcttgatatactatgtaggttgtggtctgaggaccactacatggggatcatttggaaacttgttagaaatgtagactcaggttccattccagacctgctgaattggaacaagatccccagatggtgcctacgcacagtaaaatttgagcagcactgccctagcatgattctagtgtgcagtcaatgttgaggaccactgtcttagaggattgcgtaaaagcaaatgacgtgtatataaatttagattgtaatattctctgagtataaactcattaggtgcaagctgagctcaccctccatgttttctgtgttcctggttaaagtaagttacctttgatgaaaaccacaggttcatctttgacttcaaatcagatttgttgctattgaagctaattggatcccagctcagctttgtggcttggattcacaccatataaaatcttcaacagacattcattcctttgttcagaacacacaaccttctaacgtgaacctccaattttctaaattcattctttttctacttcacctgaaaccacagatccatggcacttagtttctctgtaacagcagctctaccatggtgtccagaaattttagcccctactatcaagaacaaaacatccttgtacatgtttatacatctttttgagtaggagttttccaccagttgcagggattccctgagtctagagtaatgccacaatgctgctcccttttactcctttctaagcatttctgtcagggagaagacttagattcagttgttcactttaacattttccttagatactctcttagaaaagttgtattctgcgcacttctgttatgaagggagtaagggattgctgagatttgttaagttaccaaactagtcttgatagatgtataattattacatatccaccatcacttcatttagctgggcaagtattatcagtttggttcatgttagctaattaggtcactggtttgttcctaggacagtgttgggctggtcatataagttagaagcacctgggagctgggcatggtggctcacgcctgtaatcccagcactttgggaggccgagcgggcggatcatgaggtcaggagatcgagatcatcctggctgacagagtgaaaccccgtctctactaaaaatacaaaaaaaattagctgggcatggtggtgggcacctgtagtcccagctacttgggaggctgaggcaggagaatggtgtgaacctgggaggcggagcttgcagtgagctgagatggcgccactgcactccagcctgggcgacagagcgagactccatctcaaaaaaaaaaaaaaaaaaaacacacctggggtgctcataataaaaaaaacaaaaacccagatatttatcccagttttgattccaaagatcaggtaccagtactttctttttggagacagggtcttgctctgtcacccaggctggagtgcagtgtaccatcatggctcattgcaaccttgacctcctgagttcaagcagtcctctcacctcagcct

SEQ ID NO: 10108 - DNA, 235 bp, Homo sapiens
gtcagcaggagctgggtcggtggctggatgctgcagcagcagggactcagcgcctgggagggctcctggggcagggagagaagcagagatgcaacatttttaaaatttcacaaagcatccggctgcacccaggtccctggaacaggagacaaacagaattaatgttttataccttcgggtataggtttgagttttttccccctcatgccaagtatttaaaacctctagaaaccca

SEQ ID NO: 10109 - DNA, 272 bp, Homo sapiens
gagtccagagaaacagggagtgagacccctttgggtcctggcccttgcttttattatagtttgagcattttgtcctccttcccacagatagagcagatgtcctcaaagatgctctgtatttcagccttcagggcagctaagaagccatgagtgacttaggctgccctggccatgaacaccggagccagactggctggccagactgattcccgcatcccccatctgtgttttgaggggaaatctcaggttttgaggaatgaacatggcagcta

SEQ ID NO: 10110 - DNA, 1744 bp, Homo sapiens
aacaccatagatagcttggagaaaatgccattatcaatatgaattacttagaaacataaccccgctctcttccctgagctcatatggtacaaatcaagcacttatgtgttgaaagtgctgcatgttaaaactctggggtagcagttccctcatagtttccttgtatcctctccctcccgctggcaccattcccaggcagccaagcaggccggacttttccctggcaaccctctcgcctcaattctggcagccctgtgcgctagagtgaaccaagtgtgggctggggagtcaggtttaatttctagttttttaccatctatgtagcatgttgggcaagtcagtggtctctgggcctcagtttttatatccgtaaatggtaaaaatgttagaagtctacttcacacattttggtgagaatgtcatgaggtgtacaaaatagcagataggatattctataaatttaggtgcgctagagtgaaccaagtgtgggctggggagtcaggtttaatttctagttttttaccatctatgtagcatgttgggcaagtcagtggtctctgggcctcagtttttatatccgtaaatggtaaaaatgttagaagtctacttcacacattttggtgagaatgtcatgaggtgtacaaaatagcagataggatattctataaatttaggtgctatttctcaaatcaccttcacatctgagattttcttaactgttgtaacagtggtgacttccatttcatcactgttcatttcacagcctctcctgctctcataaaaccacagaaattgttctaagaatactgataacttatgaatatttttataggcagcagaaaaggttgatacttttaataaaatctgaccataccagctgggcgtggtggctcacacctgtaatcctagcagtttgggaggccagggcgaaggatcatgagattaggagttcaagaccagcctggccatgtactaaaagtacaaaaattagctggaaatcgctcgaacccagaaggtggagtttgcagtgagccgagatcgtgccactgcactccagcctgggcaacacagcaagactccgtctcaaaaaaaaaaaaaaaatctgaccataccctttgttaagatcaggatcagctgcaataaacaaacccaaagtaacagtcgaaatgtttatttttctctgtattagttccttagaactgctatgacaacgtgccgcaagctgggtggtttaagtcaacagatgtgttgtctgagttctgtggggtgggagtctaatattggagccatggtgctccctccctcttggtggttgctggcttccaccatctttgacttccttagcctgtagctgcataactccagcctttgccttcattgtcacgtggtgttctccttgtgccttctttacagaccattttttttctttttttttaagagacatgctggagtgcagtggcatggtcatagctcactgcagcctcaaactcctgggctctagggatcctcccaatttggcctcccaagtagctaggattacagatgcgtgctgccacacctgactaagttttagatttttgtagagatgagggcctcaccgtgttgcccaggctagtcttggactcctggcctcccaaagtgctgggattacaggcatgagccaccatgcctagcctgaccctactgcatctctaatcatatttaattagtactgcatatctttttggattaaataaaatcaatt

SEQ ID NO: 10111 - DNA, 420 bp, Homo sapiens
gacagggctttgctctgttgcccaggctggagtgcagtggcgtgattgtagctcaatgcagccttgaattcctgtgttcaggcgatcctccggcttcagcctctggagtagctgggactacaggtgcatgctgccacgcccagctaatgttgcagtttttcgtaaagactggatctctgtgttacccaggctggtctcctgggctcaagcagtcctcctgccttgacctcccaaagtgctgggattacaggcatgagccaccatgtcctgaccccagtttgttttaaagccaagcgatgcaccaagatgtttgtgtgcacatctgacagtggtaatctttgggtcagggaattatagataaattttctttaaattttttctgagctttctaaaatcagctgaaaataaaaccttattttt

SEQ ID NO: 10112 - DNA, 334 bp, Homo sapiens
tgctggatggaaggactctgagcctaccaaaggaagcgtatttacaaacctctaggtactgacttgttgctgaaggtcagaaatttgcaatgacatttggatgtattcaagggtggaggggcaggtttggggaaagttcttttaaagaaaaaatgcaaaatttgattacaagaagctggggtgcctcccagggcctcggaaagggcttgcacaagtgaagcaccctgaagataatgcttcattagctttacagtgaagccacctctgaatctctgtttggtgtttgtccaaaatattccaagttgaaggcaggcctgattatatgatcgcacag

SEQ ID NO: 10113 - DNA, 334 bp, Homo sapiens; identical to SEQ ID NO: 10112

SEQ ID NO: 10114 - DNA, 470 bp, Homo sapiens
ttgttggtagaaagtttataggaaaagtgcttggaaactgttgctggtcttccttccttcctttaaccttgagataagaatgcctttgtttgagtctcaagcatgtctcaagttatgtaactcacttgtattaaaactctccctgactgttttatattcagctttctagctgccctggtttgcagctttaattgaataggtggccttgtatttatgctaattttttgtctttctctttcagatctccatgggataaccacattggtttgtttagtaaacactgagaccaactccaccatccagaggcctgacagacaaatggcctgagacagggctgggaaagttttgcttctggttgggacttcaggaagagttttgttttgttttgttttcccccaagggaacaagcccttgaatccgggaggccaaggttgcggtgaaccgagattgcgccattgcactccagcctg

SEQ ID NO: 10115 - DNA, 99 bp, Homo sapiens
ggcacgatctcggctcactccaacctccacctcccaggttcaagcgattctcctgcctcagcctcctgagtagctgggattacaggcgcacaccaccac

SEQ ID NO: 10116 - DNA, 99 bp, Homo sapiens; identical to SEQ ID NO: 10115

SEQ ID NO: 10117 - DNA, 470 bp, Homo sapiens; identical to SEQ ID NO: 10114

SEQ ID NO: 10118 - DNA, 527 bp, Homo sapiens
ccctctgaccacccccaacatcctggcaagtcactctcctgagtatttaggcttggagcctggagacctggctcccagtcagctggaaaagtgatcaacgcacagtgcggcttatggatccttcccacccactcaccacccacctgccagattatctgttggcaaatcccaggcctgatagcatttcctctgtcagtatttcagtgtatacctctaaacaataagggatttaagagaaaacataatcctggtaccattgttatacttgaaaaagttgcctgtgcgcagtggctcatgcccataatcccagcattgggaggccaagatagaaggatcacttgagcccaggaattcgagaccagcctgggtaacagtgagaatgtgtctctacaaaagaaaaaaaaaattagccaggcactgtggcacatgtctgtggtcccagctccttgggaggctgaggtaggaggatcacttgagtccaggaattcaagaccagcctgggcaacatagtgagactatgtctctac

SEQ ID NO: 10119 - DNA, 4933 bp, Homo sapiens
gctgaatttcactgcctcctggggagacttgcactacctggggctcactggcctggaagtggtgggcaaggagggccaggcgctgcccatccacctgcaccagatctctgcttcccccagagacttaaatgagctccccgagtactctgacgactcccgggccctggacaagtaagtgtctatcagaagctttactttcatgcccactgggttttggggacattgttctgcctctgagacttcagattcagacatcaaatagaatcgcatatgtccctcccctggccaccctgtgaggtaatgtggtcaagggaaaccgaggctcaggaaaccaaggctcaggaaagagaggtgggaggtgattctccagggccacacagctggaagtgtcaggcgggatttgaaggcgggttcccatgcttccagacacagccatggtctgcattttcttctctgtgcttagcagagcgtctcgcacacagtagctgtctgtaaacctttgcagtggatggttcagagtttacacatgaatgacccaggcctcccgggggctgaaagctccctctcccctccttgaggttagaggtgatggctcaggaagcctccacaggcggtggtggctgcactttcccctgcacttgtcagatttcataagccaaggttgcgtcaagtcagtaggtggggaagcctcaaatacagcattgatccacatggacctgcagcccacagaccagcactcagttcccctgccctgcacagccagagggtctgggcgctgcttagaggtgtgaactaggggagtcagagggatgggagttcaaatcccgcctctgccccatgccaactattaggtaactttcttaacctcttcaataataacagcaatgctaataataataactgatcatatgactgccagtttttgagcacttattaaatgccaggcactgggctatgcgaagcaggtgacacatgttcatccattgaagcctcaaacagccctttgaggaagggaccattatgagccctactataccgatgtggagactgaaatatgcagaggccacctagactagtgcagtggcagagtcatgattggaacgcaggcctgtggcatacctaccatccactcacttaaccactaagttatactgtctcccctgccttggtttccttatcagtagaatgaggagtcattcccatggcatgtcacattgcagccacatcccttggcctggtgctgagctcatgcagagttggtggcaggcttctccctgcttttctataaggtggccctgaaccgtggcctcaccccctgctatcattaactgctcatgggcccctctgaccacccccaacatcctggcaagtcactctcctgagtatttaggcttggagcctggagacctggctcccagtcagctggaaaagtgatcaacgcacagtgcggcttatggatccttcccacccactcaccacccacctgccagattatctgttggcaaatcccaggcctgatagcatttcctctgtcagtatttcagtgtatacctctaaacaataagggatttaagagaaaacataatcctggtaccattgttatacttgaaaaagttgcctgtgcgcagtggctcatgcccataatcccagcattgggaggccaagatagaaggatcacttgagcccaggaattcgagaccagcctgggtaacagtgagaatgtgtctctacaaaagaaaaaaaaaattagccaggcactgtggcacatgtctgtggtcccagctccttgggaggctgaggtaggaggatcacttgagtccaggaattcaagaccagcctgggcaacatagtgagactatgtctctacaaaaaaaaataaaaaataaaaaataaataaaaaaaagtagccaggtactgtggcatgtccctgtagtcccagctacttgggaggctgaggtagaaggattgcttgagcccaggaattcaagaccagcctgggcaacatagtgagattgtgtctctaaaaaaaaaaaaaaaaaaaaaaaaaatagccaggcattgtggcatgtgcttgtagtaccagctactcagatgctgaggtgggaggatcacttgagcccaggagttcaaggctgcagtgagccgtgattgtgccactacattccagcctgggcaacagagcgggaccctgtctcaacacaaaaaaaaaaaaaaaaaaagaaagaaagaaaaagttaacaatgatttcttaaattaccagatatctagcagattcatagtccccacacccaccctttttaacagtttgctcatttgatttgagatccagataaggtctatgtgttgtgattggttgctatgtctcttaagcctctctaggttctctttcccctttttccatttttttcttgtaaattacctgttgaagaaaccaggtggacctgaattttactggctgcatctctatggtattgtttagtctgctccttgctcccctgtatttctagtacattgttaattagatctagaggcctgatcagattgaggtttgactactagggcaagatggccctggggacatacagaatagaatgtctggttgccaggctctttgtgatgttggaagccagtcatgctggcgaagtccattaattcattaggggttgaaaaatggtggtattttcacctactattcttttttaaatttatttgctgaaataactgcaataaagagagaatttccctcaattatttggctactctgtggtgaaattcagatgggaaaggcagcctaagtgttggattctctcccctccttttctttttggctttccaaataactgtttctctagcatcgtctaaaacgtgtgtttctttttagggattattatgaactcatggattttaaacatacagtactgcatttgaagagtcaattctttgcagtgtttatcctgattgatgtttaaatcattccctcttggatgctgggaagtcctgaatccttttaaacggtcacctttcttgccttctgatgtgacagatgcttcaggctcatctggtttatttcttgtcccagacctggcatcagccatttctccaagaagccctggttccttttagtgggtaatggtatttagagaccataatctggccactagggatgctcactgctacttggtccgttgctgtttctaggcttttttatggatagagctaggaattcatttagatgttcttgagagtgtctgtggagtcttcctttcactgtcggctacaaatgctccagcagttctctctgctctcagaattgggcaggtttgctatggagcagccccatttctaggacagaaacataattgcctttagaaggaaatagaaggttctctagtggtcatcctcagtcagcttagttccacagacactccagtgtggaattgctgaatttcctcagttttaagatgccagcaattgtcagacacaccatccatcaatttaataacagccttttagggaacaaagaaacattgcctccttgggtaaacacttcgattatgagattttttttttttccaaattcacaactttaaaatgtaaaaggaaacaaaaagtttcttttcaaatctaggaaatgtggcagcaggccaagtttctcccagtacagcagctgtgaggtaccaggaatccagggtgtggagtggggaaggttctagaaaatgggagggagagggaggttgctcaaaaggctgccagctgggcccttttttccaggaccaggcttctgaatggcagtgccagacacgtgggccagagccacgaggacaagggcctgaggcctgggctgaggcatgctgggcagtccggggaagcgagaggcacgattgtccttgggacaaacacaggcccacttgaggatgaacaggatgtcccaagcaagggaaccagaaactggccaggacaggagtgcgatagggctgaggtgacaagctcagagtgccagctgggaagagcatgaggggctccctcctacaggttagaggcttccctgggatatccaggccatgcggtcacagagcatggtccagccagagcagctcccacagtcacctgcccctccttctacttgttccaagccaagagctgcagagctcacctggtgcttttgtacctctctcccccagcatgggaaggaagggctacacttctttccaactatgctgtaaagccaacacagcaaatttacagaaagtttggaaacttgagaaaaatactcacctccataccctctgacccaattatgtttttcacttttgcacactctctcctggtccttgtcctcatttctcagctttataatcagtgtcctgcctcctccatgtgactgcagtgtcctcatgatggcaccttaacccctgtgaaatttacttaaccatttcctgattttgagatcttttaggttgttatccttttttaagctattgtaaataacactgtaatgagcatcttggttcggatagcctttcccatatattgaatacattttccttctggggaagaaaatcccagaaatgggatcactgggctaaaggattctgaaaaatggttcattttcccttttaaaaaaaaaacaaaaaccctgatgattgcttttctgcacctttaacagcatagccttttttttttcttttaaaaaatgtctcatttcatagatgagagacgacttctgactgttgttctcagcagtcacacctccccttaacaagcctgacacagccaggctagtgccaggcagtggggacgtacttggggccgagggggtgggggccccactgtgatgcctcctgtgcccactgagccgcccccctgccgctccgtccccattgctgcaggttaattgatggcaccaacatcaccatggaggatgagcatatgt

SEQ ID NO: 10120 - DNA, 492 bp, Homo sapiens
ggaccagcagctgaatgacctaggacatcttcacccacccgtctggcagtggggaggctgctggccagagagacaggtgtctgggttagctgggctgcctcgcatggcagtctcaagccccgagtgctttacaggctctgcttgcctcacgtgggcttctgtcccagtgttcaaagcaaatcacgtgacccagagtcaggagcagagaaggaaactccaactctggatgggatgaggggcaaaatcacattgcaacagcagggacacgggatgggacgagcttgtagccactttgcacgtgaatgatgcggcgagaagcccatgtgcagggtgccgtgctggccacatgtttttttcatctgccccagagatgctcagagttaccttggcaccacgaaggaggaaaaggatctgagggctaagttacaaaaagtatgttgggagatgtcaggggcgtgggagagaaaaccaagctccagggaggtcaggtga

SEQ ID NO: 10121 - DNA, 3428 bp, Homo sapiens
ttcttttttctgtgatgggctattccatctaccgatatatccacgttggcaaagagaaacacccagcaaatttggtgagtacttggtgtggcagggttctttattataatagtacacctccaggaggacagaagaggaggttctagaacagattcagttccctttaagggcagagtgaatttaaagttaaatagctggtgaattaaaaaacagtttctgggctgggcatggtggctcacgcctgtaatcccagcactttgggtggccgaggcagttggatcacttgaggtcagaagttcaagaccagcctggccaacagtgtgaaaccccatctctactaaaaatgcaaaaattagctggatgtggtaatgcatgcctataatcccagctactcgggaggctgagacaggagagtcacttgaacccgggagaccaagattgcagcaagctgagactgtgccactacactccagcctgggtgacagagtgaggctctgaggctctgtctcaaaaaaaaaaaaaaaaaaaaacgctttttggattagctgactaacagaacattttccttagctttgaaaagatgttctatttaaccaccagattatacaaggtcccacagataaattcaatcatgatcccttgccctgcccttctagaagttcaagcctagtcgaggactagaatttcaaaataacacatgaaggctaagatgagagcaggcgctgggaattctgggggtacaaggagggccccaaaaccctacacaggggctcagctctcatgccagggcttggctatgagaggtgagtaggagttaggatccgtagtgcaggcagaagaaacagcaaggtggatgtgtggaaactgcatgacacccctaaacaaggaggctccagatgaggagctagagaagaagatgagactggagagtaggcagtgggtccaagtaaggggagagctggggtgctgttctaaggagctaggcctcattctactggcaaagagaaatctccatagggttttaggttaggagcatcatagtcagtatcaaggtttagatccaaccagatattagttccaggaaaacttagagcggagtaagactagaaacaagaaaagcacctagggaactgtagctttgtccaggggagagaagattcaagtctaacaggcaagagtgggatatcagtctagagagaaagacatggaatggaaacacacttaggaggaacatggccatgacttaatccttcacagtaagaagaagcaagaaagaagaaagaattaaacccacagaggtgggacaatgtgctgaagggttctgaagggctgagcatatttttaacaatcaaaaccattttcttgagaactattaaaagatgtgttcacgtgtacatgataacataccttgtttcctgttagttcagtttataagtttttctatgattctgcctgcattcaggtttcagagttggcttcttaatggcattgggagaccttttctggaaggaacattcacaggagaattgaccacctgtgatttttttgaaacttaaaatgttgtaaaagattgaggctgaaggttctgttttgtaaagttaaatgaaatcacatggtagagtgacaatgaggattgtaactcatgctctcttagataacaggtatctttcatggtacccacagcaatattttaatctcatctgagcttccttgacatgatttagagtttctctgtctaccgtaaactggcagatgaatttccttttttggctctattatagcatgataagaatggtgtaaggggtaaaaaccatccctgctcatatatttccctccttttctacatccagttctcatgcctgtctgcatttcaagtatatccaaaaacagggcaggtagcccaggtaaccacagcttattaacaagtgcatagcaaactataaataaaacagtgtcacaaactctgccacacccagtctttgctactcttcatgtggctgagattctgactttacagaatgtaaaaaaggtcaagaaatgaagcaactcctctgccagttagaagagggggcaccaacgccccagccccagccctggactggagaaatacccacccagcgaatcacttctcgcttccaactatcttttgtgtgtcttgggtctcttgcctcccagtgagtgaggttttctgtatattgcaagcataactttcatttacatgagttggtaagagtaggtctttaaaactgtctggtgacaagatattctacctaacagctgtttttaatgtctctctaaagtgaaaaggtgaaaatcattctcttttctctttatagattttgatttatggaaatgaatttgacaaaagattctttgtgcctgctgaaaaaatcgtgattaactttatcaccctcaatatctcggatgattctaaaatttctcatcaggatatgagtttactgggaaaaagcagtgatgtatccagccttaatgatcctcagcccagcgggaacctgaggccccctcaggaggaagaggaggtgaaacatttagggtatgcttcgcatttgatggaaattttttgtgactctgaagaaaacacggaaggtacttctctcacccagcaagagtccctcagcagaacaatacccccggataaaacagtcattgaatatgaatatgatgtcagaaccactgacatttgtgcggggcctgaagagcaggagctcagtttgcaggaggaggtgtccacacaaggaacattattggagtcgcaggcagcgttggcagtcttgggcccgcaaacgttacagtactcatacacccctcagctccaagacttagaccccctggcgcaggagcacacagactcggaggaggggccggaggaagagccatcgacgaccctggtcgactgggatccccaaactggcaggctgtgtattccttcgctgtccagcttcgaccaggattcagagggctgcgagccttctgagggggatgggctcggagaggagggtcttctatctagactctatgaggagccggctccagacaggccaccaggagaaaatgaaacctatctcatgcaattcatggaggaatgggggttatatgtgcagatggaaaactgatgccaacacttccttttgccttttgtttcctgtgcaaacaagtgagtcacccctttgatcccagccataaagtacctgggatgaaagaagttttttccagtttgtcagtgtctgtgagaattacttatttcttttctctattctcatagcacgtgtgtgattggttcatgcatgtaggtctcttaacaatgatggtgggcctctggagtccaggggctggccggttgttctatgcagagaaagcagtcaataaatgtttgccagactgggtgcagaatttattcaggtgggtgt

SEQ ID NO: 10122 - DNA, 851 bp, Homo sapiens
cattttataatagaatattacatttatttctggaagtgtgttttcaaaaagatatttacatagtctgtaaactagaaagtgttaggtaaagctctaggttactgtgttactattataatattaaacattcgaataggcagtcgttcaaagactctttggaatatctatgaatgaatatcctctattcttataatattaaaacccataagtaaatataggacatacaagagaaatgagttaaatgactatgtaagggagagtttattaaaatttgatgaaatttactgtaggaactaaactatgccataaaacaatagctttctagttcatttccagtaactgttcccatctcctttaccacttgttaagaaaattaaattcttcagtcacgctgctttaaaatgggacaaaatctattaagttgaaccatatataattgtggatatttggctgtttttaatctgacaagcagtaacttcatatggtttgccttaatatatatttgttttagtcatgaactcataatccattgatgctctttcatgagaagagatatcacccatatttccttattgatattattggtacaggcagacaaccctggtaggagagatggattctggggtcatgacctttcgtgattatccgcaaatgcaaacagtttcagatctaatggtttaatttagggagtaattatattaatcagagtgttctgttattctcaatctttatagaaacgattctgctggttttgaagaacagatgtattacactaactgtaaaagtagttcaagagtgagaaagaataaattgttattaagagcaaaagaaaaataaagtgattgatgata

SEQ ID NO: 10123 - DNA, 1491 bp, Homo sapiens
ccaaggacaccattcccagagaagactgctagaggacaggatgaggtgggcacaaggaagatgagattaggggtgaaagcctgatgatctgccaaagcatgggacaggaaggcagaaacgtaagtggaatgtagcatgaccctagcagccggaagaaacagttgaatctctcaaggaacttctcaagtgtagtgatggtggctgctcaggcttgagtccctcaccagcccagccagaccatagtttacagagagctaaaccagcaacctcaacagaacatgttgtcaaatgatcctgtctaaaaactgttgattaatgagctgatgtcagccagatggaaggttatgaaagcatggtgtcaccaggttgccctaggacctatttgtaatattcccttacagaaagcttacacctggaaatgtaagaaatgtgggaaggcaatttattcagggtaaaggccttggaagactaaagaattaaagaattcatactgctgaaaactctatttatccttttaatgtttttttttttttactttaaattttagggtacaatgtgcaggttagttacatatgtatacatgtgccatgttggtgtgctgagcccatcaactcgtcatttaacattaagtatatctcctaatgctatccctccccactcccccctcaccacaacaggccccaatgtgtgatgttccccttcctgtgtccatgtgttctcattgttcagttcccacctatgagtgagaacatacggtgtttggttttttgtccttgcaatagtttgctgagaatgatggtttccagcttcatccatgtctctacaaaagacatgaactcatcattttttatggctgcatagtattccatggtatatatgtgccacattttcttaatccagtctatcattgttggacatttgggttggttccaagtctttgctattgtgaatagtgccacaataaacatacgtgtatatgtgtctttatagcagcatgttttataatcctttgggtatatatccagtaatgggattgctgggtgaaatggtcaaatggtatttatatctcaagattcctgaggaatcaccacaccgacttccacaatggttgaactagtttacagtcccaccaacagtgtaaaagtgttcctatctctccacatcctctccagcacctgttgtttcctgactttttaatgatcgccattctaactggtgtgagatggtatctcattgtggttttgatttgcatttctctgatggccagtgatgatgagcattttttcatgtgtcttttggctacataaatgtcttcttttgagaagtgtctgttcatatccttcgcccactttttgatggggctgtttttttcttgtagatttgtttgagttcattgtagattctggatattagccctttgtcagatgagcagattgcaaacattctctcccattctgtaggttgcctgttcactctgatggtagtttctta

SEQ ID NO: 10124 - DNA, 110 bp, Homo sapiens
tgtttctgctctttattacttctttctttctgcttattttggatttagtttgctcatttttttctgttttcttaaggtagaagcttagatcattgccttgagatgtttct

SEQ ID NO: 10125 - DNA, 14273 bp, Homo sapiens
agggagggaaaagtaaagatgcaccttcatgggatcctgttgctctgaaactcccagagcggaatactccaagaaactctcattgccacctttccaacagccctagagcaatagagcacgcctatcaatatggaggaacagccaacagccgccaagagtttgaacacttaaaaggagattttggtgccaagtaaagtaacacactatactcctagactcctaatgacatggctgggctccatctttgtttgtcacatgtcatcgttttttcccatctttcctttctgtgccaccttaatcctattatgttatcaccaaaataaacactaaatagtacatgatttatgctatcaaaagaattatattctctgtgactttccaattgtaaggttcataaaacagtattcttccaggatactgtatttgatcaaaaagaaaagacaatcaaggaaaggaagatggagcaagtttcaaatgactcatcatctaacattgatatccccctccctctcccatacaaattgctttcagattgtaaatgggagtgcatttgaactgctaaaaggttaataaggaaaggcattgaaaatacaaatatgcttgtatgtctatgaccctccagctatctccaaccccatcgcctctttccagtatttcacaaatctccaggttatctgatattactgaagaattatttttacagttttagcacccaaatatttttatataggtcttacatagctctgtcaaacattcatagaggcaaagtattcaataagaaatctctaataccttataatttgctacctgcctaataggcagaatcagtattttgtattttccaggaagaatttagagttaatcaaactagaagttaacctaataaatgtatcttatccatagcctggggctaaatttctagaaggttttgtttaatttctacacgctcgggtggctgctttttacatgtggtatccattaattaatttttactgggaaaaaattttagtctgtgttttagatagtgcacaactgatattatttgtattattcactagtattttgtccacatggataagcttctttaacatacatatttttactaaattgcagcctttttttttttgagacaaggtcttgcttgctctgtcacccaggctggagggcagtggcatgatcatggctcactgtggcctcaacctcccaggctcaagtgatcttcccaccttagcctcccaagtagctgggactacaggtgcgcaccaccatccctgg[452 bp omitted]ccagatctcagttttccattcgtctgagaactcgttcctcccatggcatgatcttctatgtctcagatcaagaagagaatgacttcatgactctatttttggcccatggccgcttggtttacatgtttaatgttggtcacaaaaaactgaagattagaagccaggagaaatacaatgatggcctgtggcatgatgtaagttgaaggcagagaacagcattaccagcaaatagctaccattgtcaaatggacactaatgggcctccattactctctctagaaatatccattttaaaattctgctgctgcacactcagaattcaatttcaaaaaattgtattccttataaaagtcttgaagcatactatttaaaaagagacacaggctgagcgtaattatttaaaccaaaggatcagtggtcaacataaactgaaatttggtttttaatgatttctcacttattttctactgccaataggtttttacttttcagcaattattattgagtgtcttttattggctaagctgtggaagatacaaagtgaagagtaaatcagtgaggaagataggataccacagtgggagcagataaatattgaaagaaattggtgggtatgtaatgtcaagagtaagcaatgtaacatgcattacaagtaatcacaagaagtttaactgggagagaacatatggcctgttctgtctatatgtggcctggttaactgggaaaagcttcatagagaacatggaaaaacataagctatattcagaaattaagctttaaatcattctatctagaggtcagaaaatacatagatcacttcctctaatacctgaagtggtaaatggaagatgatcatgaaaaaaatacacctatgcatataaagcaaaggggcctggagacagctcacaataaaggcatatgctgtataacaaaacagaatcaaatgagggataaagtttctgccattccaaaaactgcattgccagaagcctactaaacagaagagataaactcctgaccttcagagatggggccattttaaaaataaactttctgaagatttcccacagcattgcaatagcaaagttggaagaagaggaaacacagccttttctgcaatcttggaatgtacctgagatgtgctattgtccttctcttcatccaggtgatatttattcgagaaaggagcagtggccgactggtaattgatggtctccgagtcctagaagaaagtcttcctcctactgaagctacctggaaaatcaagggtcccatttatttgggaggtgtggctcctggaaaggctgtgaaaaatgttcaggtaagccaggcatgaccaggtagagccattgaccattagagccagaagatcatctaattgaggccctcgtctcacagattaggaaactagaaactagcaccagtaaaactgtagttttctggaaatgggatatcaaagtaagtactgtcttatgggctgcctgtctgccctgtggcattacaaagtcagaagtaatctttcaattctaaggtagatgtcaaatgaaaaagtttcagaggcataaattatcatgaaaatttatgtctcaaggagatcttatttgttcaggaagtacccatacttttaatgtaaagacataacaaaaaagaaagcaaatcattgcattatacattattgagtgaaaaaaaaagtttcaggtcattatgcaaactacaatcccatttttcttacacacacacacacacacacacacatacacacacacacacacaatttgtaaatgtataaggaaatgtggttgccctggggagaagtgagaatatagtagaaaaatattatttgtgtaatttaaaaattaaaaatattgcacttataaaaaatttagcaataaaaggaatgcatcaaaggactaaatttttcttaacataaatataggttggattttagcaatgttaaaaataatttctaagacctattaatatatgtagatgaagcaaaaaagatggtttacattataattagattttagataagcagccccaattccatggcaatctcttttttaaaatgtccaaatgcaggacaaaatcagttatcttaagtggcccaagtttcatgtcctgtgatatgataaattctcaaccacaaaaacagctcatgaaaccagaaatgaaagctttctgctgtttatttggctatggtagatttaagtaaagaactttgctagccctcatcagccttaggtgatcttggcacagctgtcattcttgagggaaaactaggatacttctaaatatgcagtttgaaaaccacagctgcaacttattgtgtcaaagtgtaacataaaaatgtccatagcttaattactacaggttgacattatcaaatacaaaattccagcttcaaacaaccagttagaaagcaactatccaggaaagtactgatcattcagatatctgaaataaatgaaacaaggaattacgtgggttccttcaggactcaaaccccctcattttgcttccccttggtgcatttgtgttgagaaaattgattttaagaaatatcttcttccctcagattaactccatctacagttttagtggctgtctcagcaatctccagctcaatggggcctccatcacctctgcttctcagacattcagtgtgaccccttgctttgaaggccccatggaaacaggaacttacttttcaacagaaggaggatacgtggttctaggtaacattagtcatgttaaaaatatgagtcatgaaatgcttcttcctggagatggctaacagggaatatcaggcccagagttaaaacttaagaatgccaaactcagccctagaagatgacctcttcccacaagaaccacctttctccctcctgcactccaaaccatacatgcagtccccatccctgtatactctccctgaccaggcttctccacagctgccaaacttctggatgaagaccacctgggctcctttagaatgtctatgctgctccgtggcctgatccatgtcagtttttggccaccttgctcctcaaggtcttgctctgctccttcttggcatgaaccattgtcctactaaaggaagtcccactttctccccatgacttgcaacaccagcagacaacgttatccttcagaaatttttatttctggctttttattattctccttgaccattactccctcactcattcagtttttattgtatgcctcccataaggcagtccctatgccagatgatgggacataacagttctaaaaataaataaaatcctagcagactacacacaatcatcatctaattcattccaagaatattctatggagcaatcgctgggtgtgaggaagacaccagaataagtgcccggaattaggataggaaagggtataaagctgcatgttccctcctctcaaggcacttaggtactttgcacatcccctgaataaagaaattacactgcagccaagtttactttttaaaccaccaccatatccagcagaacacccagaggtagtatttcctctctgcttagctcatgattttactttcctgcctcacccatctttacccctacactaaaacacctacacttacaattctcagcctttcatggaatttcagtgataagaactcttaacagtttggacagctgggaatacagagcaaactgcacaatttatatactactccatgagcactaactaataacaggaaaaaattttaaatgatttataggatacattaaatgaacattatttagatgccctggtttgcaatgagtctcttggagtaaacacaactattcttaataagaattttattggatcacctcagtaacagctcctaaatactttctctgctctttctcctctgaaatgctgtacaacactggcaccagttaggtttctgtttaataattattttaaaatacaggtccgatcaagacagctgtcttgctcagtgactgtaaaataaagcctaacttccatacttcaccactagagcccttcccagtgtggctcccactcaccatgcctccttctcccctggcagggacagtccagccacagtggccttcacagtgctctccaagcattccagcctctgtacctgtgttgagtctacttcctctgcccagattgccctgtcctcctcacttgtgaaatactcagtagtgctgctgctacttggaattaatttctcctcccctgagctcccataacacatattttgtgtgctgttgccagcctcacaccccacaacaggattgatgcattagttatcttggttccccacagagctttccacagtgagtttgacatggaaaagccactttctacttatctgttaaaaaatgcatcaaactttcaaaaacagataaaaatatatataattacaaaatcacaccatagttacaaatatgatcttgctgttcttgggagtttatagtgtttctctccacagatgaatctttcaatattggattgaagtttgaaattgcatttgaagtccgtcccagaagcagttccggaaccctggtccacggccacagtgtcaatggggagtacctaaatgttcacatgaaaaatggacaggtagtgtctgaaaaatgtttaacaatttgtctcatctgaccttggattctagatctgaagcagatttatttcacagaattatttcatcaatctttcctaactgaaaagaaatataggaaagctataacatgaaatgtaaatgtgggcaatatttggattcagcttcctatgttgaaagttgatttggttaaaacaaagagtcataaaaatatggcaaaactatcaaaaaaatcactaataacaacacagttttaagagaagaatgagaagaactttttttcaccaaatggaatcagcaaacataactatcaaaatcaacaaacactaaaacatctttctaaatatctataatatgtatgtatatcagatatatgtatgtgtactagatatgtatatatactatacatattattctcaattgatagaaataaaaaattatgttgtaatgccactttcatcctaagatactactaaagaatattcatggaagtattcaaataaatattaagaaaaaagtatattttcattgatgctgctaacttaacataacagatttttatttgggttctagtacattctattaaattatattgagccatcacaataaaatgtatccctacttggtgtttactatttgttgggtactattctaagctttacctagattaactcatttaatcctcccaattatctccatgatgtaggtaacagtatcgcttataatttacaaacgagaaaactggggcagagagtaagttaaataggagactggctgtctagcttcaaagtccatgttcttcaccaatacttcaacctgctttgtataacacactcaatctttagaaattaaagggatttattctatttcttattgtccctctctcgcaattttctcccctatgaagtcactttgttctctccccaaagagcacccccagttgaacctatttctataggctgccaaagacccttgtgttcaaattgcaaagctaatcatgtgtgaatatttgttgaagtattgcttcactgtggtaaattatttaagaaattcagttttatcacaatgaggacaaactaaatcatacaatgtgtcctatcttttgcaggtcatagtgaaagtcaataatggcatcagagatttttccacctcagttacacccaagcagagtctctgtgatggcagatggcacagaattacaggtgagaaaactgactgccctggggagcctgcacacccaactgtaagattatgatctggcagaacttaggctatcacttatatgataggtaatgcatgacagtctaaaagtatccaagaaaagaaaatcatgttattatactattatgtgtatactgaatccacatgtgatttcaaaatatgaacgctgcaaaattgtgttaaggggttgcttcaataatgcataacttatagggcaaaaaaaagtagcacaagaatattctaaatattctccctttctaaggaaaatgttacagtaatctcttggttagacattgttagacatcattgatgattttaataatatagaagaaagtgtgggttttattctggaataaataaaagcaattgctgtgataaatagtctttctcaggttaaaaattcatcactccagtgccacttatgaccagtctttgccctgcatttcagttattagagattctaatgtggttcagttggatgtggactctgaagtgaaccatgtggttggacccctgaatccaaaaccaattgatcacagggagcctgtgtttgttggaggtgttccaggtaagtgttgtttaaaaaggaaaagttcccaatccaaaaaactgagttctcacaattgttattgtagaattgagccatgtgtttttatgatgcacctagttactcaaaggattttatatacagtgttgtttaaatggaaaaggcataataaagtgacatgtaagaactagaccccagcattccagccagtggctattactctcccttgccatatttgcttatttttttctttcctttcccttttaagtgcccgccacacacatacacacagtgacacacatactcttattttatctctaacacaaagaaaactcattgactaacactacagtaggatctgagaactttggaggattaagtttgctgttagttgctccccttcctcagtaggaaaaaatgcacagttcggtccatgattagtctgaactgcaaaaacagctgcagaccataagttgttgtccattggtagtgacattccctcagagaggttcccagctgcaattctgtaaacatcatcagtcactgctgctgtcatctgccaagaatggtgtataatcccggatggtgacaggacacttatggacaacacacaaacaccccaattgttttaaacctgtgaagcaaggaccatgtcctcatattgaatgcatttgtttttacacatttcactaacttggaaaacctgaatgctatggctggggagtgggatttaaaagggaaataacccagcttttgcagctggaacttggtggggagtttttaattgacatatcatagttgtacatattttgggggtacatgtgatattttgatacctgtatacaatgtgtaatgatcaaatcaggataattgcaatatccaccacctaaaacatttatcttttctttgtgttggtaacattacaattcttctcttctagctattttgaaatgcacaataaattatccttaactataatttccctattgtactatgaaattctagaaattattccttctatctaactgtatttttgtatccattaaccaagttattttcatctccttcttcccccttcccttcccagcctctagtaactaccaactactctctacctctctccatgagatttacttcttaagctcatgtatgtgagtgaggacacatgatatttgtctttctgtgcttggcttggtggagattttaataatcttctaatagattatttttaaactgacccataaagacagacaatgctttaaagaagagagcaagaagcacagataaaattaagcatctgaccttgggtactccaaaaatagtaacaactaagcactcttctttgtctgaatttttcaaatactagtattgacaataatagtaacccggtgtgaaaaaaaatatttgagaccctcgcaaagcaactcttctcctttgtctcctgcttccactcccctctccattccccagtcctctccctgttcctgacttcagctttgaaaggattctggcaaaggccagcactgcacttcatgcaggtgcagcatgaaaaagtctcacatgagtgcatatttctgcacattgcttccctccagaaatcacaacacagtttaaaatgtttcacaggttcccaagagcctccaggattaaattcaccatagcatgcaagctccctgatcatctgtctcctccttgtccctgccttcgggatctccccacaccttctgggacttgcagttcctaaatgttcaacgatggtatctttgctccgggcctttccataagggaactgggcctcaatttctgggaaatgttcttcctttcctcccctagtacctttgttaagaaacaacttctcctattcctccccattctaactcctattgacctttaggactcagctcagacttttacttacaacacgcccctttccccctaggatgtatacacatactgctgttgtagcacttagcacagaatattgttgaaactaagaagtgcattccttgatggcagggaacatgactatatccaacacacagcatggattgtctattaagcattgtgctaggctttgggaggtggacaaaacaagcatggccctccctcatggaagttggagtatttgtccttcactatgccacccaacgtacttactacatctttcaaacagatatttctctttggtttttgtttgtttgtttgctttcacagtctgatcccagcctcacacactgccatcatccctcactacaagagttgctaagccctacagactggacaggcaagatgtacctaaagccaaattcagcctgcctgaaacacagaatgaatagcaaactttagttaatgagccagcacaggagctagcaggccagaagggcgtaaccaccagcccactgcaccactgcagcttttaagtccatctaagaattatgccagcaagcctagaataaaagcaactatactttaagatgaaatgtaattaattatatcattttgagctgttcaagattaattccactaaaatcacatcagaaaccaggcattaagaggatagctaaagaaattaggctaaataaaacccctaaatgcactgaattctccaagaataccactcagaactctggtgactcattatttctatccataaaaagctaacgcataaaattcctagaactacacaccaaaaaagtcaactttagtgtgtgatagttttaaaatcaaaattaaaaatcaaagaattttttttctgccggacatggtggctcgcgcctgtaatcctagcactttgggaggccaaggtgggtggatcacttgagctcaggaggtggaaaccagcctggccaacatggcaaaaccccatctctattaaagatacaaaaaatagctgagtgtggtggtgagtgcctgtaatccctccagctactcaggaggctgaggcagcggaatcgcttgaacccaggaactggagactatagtgagcacagatcacaccgctgcactctagcctgggccacaaagtgagactctgtctcaaaataataataataataaaataaaaaggttttgttaatgtagcccacccatgggtctaaccattcattcctctactgaaaatcctgcattatttgtatatagtcaagcattcaacctgggaaacattctctctaaaaattatgcattaatttcattaatcaattacttaggatcctagggcactgtactgtcactacctacaattaattgtatggtgaattattcagaccactaactgctacatgaattattacctccagatgatttccctcataagccaaaggatggtaagcttgggcagaatcaaaacctaagttctaagtcaggtctccaaagtaagcagaagtattagatgtttctacctcttataagcattcctgttcactcatttcttacccaaatgatgaagtacactgagcaggcttgaagaatagtcacactaatctagagacaataaagggaattgatctctcaggccccttccaaatctaaaacttttatgattatcattctaaatataaaatgctatttccatgatttattttcagtacacagcttctgcatattcttaccctacattgcttagaaaacttattacagctgcttgctgatgtttcatttgctgttctatgttctttcctgaattactgatttctaagtgttttccatcctttatctgctactgctcacatagctgtttgtaaataataataagctttggctaaatggattttaattttatatttctaagctctctaaatcgctttaaattatattgcttctatcatcctaacacatttaattgtgtctgtacaattaataagcataaggcttcttctagatttctaattaagaggagaaagttcccttggcataccacagggcacttgtgcccacacaaagactaagcgagttatcattaccctatttatagttcttaaaccctgagctcagaaaaattgaatcttagtttattcgaattcattactttctcattatattttatgaacaggcaaaaatgtagaggcttaagggtgaagggtaatgaattaaacagaaatattaaccaagtccaaaaatagtgtggaagctaaaatttctttcctccttcttagcaaagtacacattataagtgaggcccaggtgaaattaactttaaaaaacataggtagatcatgaaaattcactgctgaggctttacatgtaagtggtaaatttcagccttgaaagacagctacaatacacagaaatgtgatcatggaaaacatggcaaaacgttaaaattaccacatgtccataggacttcacaagcaaataatgttactgagaaatgagtcaattataactatgttctatttttgaaatgtaaatcatattgatgatatgagcaaatatgtatacttttaccaggaagtaatatttgggcttggaatacctcaattgcaatctttgtttttatttcttgctcttttcagaatctctactgacaccacgcttggcccccagcaaacccttcacaggctgcatacgccactttgtgattgatggacacccagtgagcttcagtaaagcagccctggtcagcggcgccgtaagcatcaactcctgtccagcagcctgacatgacagagcacagctgcccaaatacaaagttctttagagcactgaaagaaacacaaagccagccaggaggaacagtaactcttccttcgggtggaagctttcatcgagttgaacaggacttaaacgaatcatcagggaccggatatttcttatttctcatttggattcttaaccttgaatccaaagtgtctgcaatggacaacaattgaaggagtggcaaacttacttgtattgagagcacacgcaattcctactggtgaaattactgtttctgtttctaataaaatagaagggattccaaataaacacttgcacacatttttgaagtgcggctagattctcagattcacctttcttccagggaagataactttcaatctatataaaaatctctgtcctaaaactacctttctttattttgaagagacttactaacttacatataatctaaattagatgatagatttgtttttagcccttttgtttggtctatcagtataagaagaatattttaggtttatagctgaagttatcaaggtttaataaagtaaatttctaacagaatactagaaaaatgcagtataatttaattttttctaaataagaaacacaggaaatcaactactttttccccttccttatctccttaaaagaaaaataaaattgtacatgagaggaggcttctgtaggttattattaccattattgtgtgttctatgggaatcattgaggatatcacagcaaaaacagtaggacaaaatcataaaattcaatttaagagtacacaagtccttttattaaaagtttgctcctagcctgggcaacataatgagatcccatctctgcaaaaaaatttgtacatgggcatacacctgtagtcccagctacttgggaggctgagacgggaggatcgcttaagctcaggagttcaaggctgcagtgagctatgactgctgactgtacctgcactccagcctgggcaacagagtgagatcctgtctcaaaaacaaagtgtgctctccacatacctgcaacacaactagtcttatttctaaaatgttataatcttttttccaagtagctacattaatatagtctagaaaaaaatggacttgaatagctggtagaatattaaaatatagaaatgaaataaaagaattatatctaaaaacctcaactcagaagacagaaaaagagaaaataggccctgatatcaacagaattaacaatacataaaaggagtaacttttgaggggagaggatataaaatattttgaggaattaccaaggggaataaaacaatgttaccttgaaatgattatatatatattacatattggtatatatgtccatacctacctatatcccctgctacccttctgtctgaaatatacaaataatgataatgttgaagatatcgataaacatagctaatgtctgttcatagaggacttactaagtgccagccaccatgataagctaaagttaattattttatttgttc

SEQ ID NO: 10126 - DNA, 5379 bp, Homo sapiens
gtttcctgatttacaccacatccagatggtgctgagaggatatgaacaggcgagagaagtaacaaggatctcatccattcttgcttcactcaccacttcctttttctcagaggtcaatgcctgatgccaggtccactcactgaaattccataaagactggaatttgttgccttggagcatgtatatacattctcttgttattctcctcccagttcctcatcaggaccttctgttgcttctaatagttaacctctttaaatagcacagtttccctcttctgaaagtaaagttgcagtagggttctgatggcattaatattttaaaagaacttgtgattttgtttacttaaaagtgagggatgtgaacagatgtcgactcaacctgagaaagaaggtatttgttctagtgactaaatttataaatgagattcagagccacttgattaatagaagatatttactttgaaaaatacagcgagacacactaaaaaaattgaccttttgcagtacttttcattggattgcttcataatttcttggtgttggaaaattaattcctaaagcacaagattaaaggatgcttgggtaagcaattagtttacctgtcttttctgggaccttacacggttcatccatgattgcattttcttttagaattggagtttaatgaataaaaactttaatataatctactgattctttatctcactaaggtgaaacactcttatcttacagaaatatttccccttttctttgcttttaggttggcattgcaaatggtatggtcaccgaacaggctacaaagaatgccctttctttatcaaagacaaccaaaagttacaacagttcagagtagtaagtaaaaccatacaatgtcattttaccttaatcagagatggtgaatattaattaatccgatagtcaccagcgaactgaatgttcacataaattacattcccagaagccttttggccaaagcgtctgctgttaactatacctctgttaaattgcatttgtaagacaaatttagctctttaagaaaaaaactaacatttataaacgtgttctttgcttatacattgggacagtgattctttttctgaagaagacattgttccctattcaactcccctttttaaaatttattatataaaaagtcatgtctcataactaaaatcagagttttagtttcccagtctttttttttttttttttttttttttttgagacagagtctcgctctgtcacccaggctggagtgcagtggtgccatctttgctcactgcaaactccaccttccaggttcacgccattctcctgcctcagcctcccaagtagctgagactacaggcacccgccaccatgcccagctaattttttgtatttttagtagagatgggatttcaccatggtctcgatctcctgacctcgtgatccacccgcctcggcctcccaaagtgctgggattacaggcgtgagccactgcgcctggcctagttttccagcctttaaagagtagatgtctgtctattataagctagaattgtgtatatttcctcttaaatgacagttagacagatctatcattagcatcatctatctatcattccccgctttaacatagagtcacctcccagaggtgttaattcactgttcagtaactactgccaagtgaaatatgctgccttgtggatctactgaagtgatcagcatacacttgtcccttggtatccatggggaattggatcccagtatcccctgggataccaaaatccacaggtgctcaaagtccctcatataaaatggtataggctgggtgcagtggctcaacgcctgtaatcccagcagtttaggaggcctaggcaggtggatcacctgaggtcaggagtttgagactagcctggccaacatggtgaaaccccagctctactaaatatacaaaaattaggctgggcacggtggctcacgcctgtaatctcagcactttgggagtctgaggtgggcagatcacctgaggtcaggagttcaagaccagcctagccaacatggtgaaaccccgtctctactaaaaatacaaaaattagccaggcgtggtggtgggcacctgtaatcccagctactcaggatggctgaggcaggagaatcacttgaatccaggaggcagaggttgcagtgagctgagatcatgccactgcactgcagcctaggcaacagagtgtgactctgtctcaaaaaaataaaaatacaaaaattagccaggcatggtagcacatgcctgtaatcccagctacttgagaggctgaggcatgagaatcgcttgaacctgagaggtggaggttgcagtgagccaagatcatgccactgcactccagcctgggtggcagagtgagattttgtcaaataaaagaaagtagaatagcatataagctgtggacatactcctatatattttaatcgtctctagattacctataatactgaataaaaagtaaattgttgttaaactgtattgtttagggaataatgataagaaaaaagagtctgaacatgtgtaatacagacacaaccatccttttttttttttttcaaatattttcaatccttggttgaatctgtggacatgtaactcttcaggatacaagggccagctatatatgaaactgaagtcaacagacattcttttaacattttaaggcgtttaaagttttgtgtttttgtcttaatctgaaaaataattattctagatcaagcacttttaggtgaaatgtcagtttttacagatagtataaaacaaaacttgttgataaatctcaaaaatttaatgtacttctttttgacttagaaattcaacttctaaaaatttaccctaaggatataacagaacatcaatttatacaactctataagcataatgttcataattatgattttttattttattttattttattttgagacagagtttctctcttgttgcccaggctagagtgcagtggtgtgctctcggctcactgcagcatccgccttttggtttcaagcaattctcctgcctcagcctcccaagtagcagggattataggtgcccaccaccacacctggctaatttttgtgtttttagtagagacggggtttcaccatgttggtcaggctggtctcgaactgctgacctcgtcatccacctgcctcggcctcccaaagtgctgggattacaggtgtgagccaccgtgcccggcccataattgtgaattttaagtcactttcagttatagaatacaagaatacagtttatttgccttattaagcaaaatgaagacctcatagtcaggcttttaccaccaagtccaatcttgcctccctcctgagagtgggtttgcagcaaatagcttgatgtgtatatttccagacttccttggggtatgtaacacgtatttttgagtacttataaatgatcattcctatgtatcattttgcaactcatttattttgcttaatactatcttttggtctaacccaatagaacaaagagaattacctcggtatttctaaacttgagtactgttttatagtacgactcttccagtttatgcagttatttcctcatgaagaatattatttcgtgtattttctcattgggaaattatttttatagccttaatgagttatcagtgatatgacccttaaaaggattaaaacatgttgagcgtgtggctacatcaaacagtaaaagaaaaaaaaactgttttctgtaacataggggtttaattttatttaactaacggtccatgaagcctaaccaaaccttaaccttctctgtcccttaaggcacatgaggatttcatgtatgacatcatacgagacaataaacaacatgaaaagaatgtaaggtgaggttgtcctggtgatagtatctatttaaagttttaacttatataaagttggaaaaaaaccttctagcactaggagagtgatatagtaaacatggcacttcaattgtgaaatatttattgggtaggagtcatggctgacaagaccagtgttggggaatcagcaggccagcctcctcctccttgggttagcttaaagctgtaggcttggtccagttctctgaccactgcagttgatattagccacccatgttgtgctatttacttgcatggtacaattggtaccatgcaaggtaattcagtttatctcctctaacgtcttaaggatctcagcttttgttaaagattatacctagacaagattagagagtgaataatcaggagagtttgttttttcaaactggttacattaaattataattgttgagggtgtagattatctattaggaaattgagcagttggggaatggtttagtaaagtatgcgtctgttagaatttataattgtaagtactgtgggaacctacagaaatgactaggacaaggaaaagaatacaaaaatggtttgtacactggttacagtcacataaacataggcattcaggtgaagaagaatggagaaaacaggtaaaaataaaaataagtactgtctttgtgatgtggttattcatgatccttccatattgcttttgaatgacatatttatctaagcaactgttgtaagttaaagctaaaactgactgttctttgatcaattttgaatgtttaggatacagcagttaaaacagttactggaggattctacctcaggtgaagataggagcagctccagttcctctgaaggtaaagagaaacacaagaaaaagaagaagaaagaaaagcataagaaaaggaagaaagaaaagaaaaagaagaaaaaacggaagcacaaatcttccaagtcaaatgagggttctgactcagagtgacaaggatgtgacttgttcaacattctcttctcaaacactgaccaaggaacagaggaagatgcagtcagagaaagtagcaggatagagacgccgagagaggagtatatgtgggtcacagcagtgagctcccacccgccttgcagtgaagatgtgaccccaggagagggagtgtctccttccaggtgctagctctggacagcagctgattttaggcaggaaagtttcttcatcgttgtcctccctgctggtcacatgagtttacgattccttagaagtgtctcccacagggtggcaggactgggagaatctctgaggcgtgtcttccaggccctcccacagcttgtgccctccacagtgtagacttgaacacttggcctcatgtgatccttccaccttggcctcccaaagcattgggattacaggcgagagccactggttggctaaaatatttatatttacctgacatgatttgttgatttgggggctagggagttcttaaaacaacaataaaaaatcttctgtggctgca

SEQ ID NO: 10127 - DNA, 2506 bp, Homo sapiens
ttgccttccaccgtgactgtaaacttcttgaggcctcaccggaaagatattccagcaccacacttctcgtactgtctgcagaaccttgagccaggcaggtgtcttttctttataaattacccaggctaaaatggcatcatgatttctcccactaatcttcagactgttaataggatgcactttactcctgtgactagattgtgttaccagtacaaggaaagggagaccacctgggtgttcctaaccaaatcatgagaaccctctggaactcgatttgtccctggctgttaaccaaagaggaggtcagagagtccaagcctgtgaaagattccacgcatcattactggttttagagttgaaggggccacatggtgagggatgcagcaaactctcatcaaaggttcctgactaacagccagcaaggaaatggagctctcagtcctacagctgaaaagatccgcattctgccaccctcaatggttctggatgcatattcttacccagagcctccagatggaagcccacctctgctgacatcttcggttggggtttgtgagatgcaaggtcgagaacccagttgagcctgctcaggcttctgacctacaccactgtgaggtaatcagtggtggtggttttgagcttttacatttgtgagaaagtgttaatgcagcaacaaactgatccagaggtttaatgagctttccctcctcctctcaggccagtccatcacctatgctctggatcccaccaacagccagcagtagggggcagtggctggagcactggccctgcatccagactgcctggctttgaatcccagctttgctagctgtggagttgctccacctctctgtgcctccgtgtccttgactaatcatgtctaccagacttctagtgagaataaggggacttgatatccataaagcatttagagcagggtgtggcacatctcaactctaaatgaatgttacctgctcctgctgctactgctgtcaccatcatctaatcctcagggaacttcctcctcctttatcccatgtcactcacgtcttcaaactcttcctttctattgtgatcttgccccagtatttaaaaattgttttggctcatgcctgtaatctcaacactgggaggtcgaggtaggtggatcacttgaggtcaagagtttgagaccagcctggccaacatggtgaaaccccatgtctatcaaaaatacaaaaattagctgggcatggtgatacacacctgtaatcccagctactcgggaggctgaggcaggagaatcacttgaacctgggaggcggaggttgcagtgagcagaaattatgccactgcactccagcctgggcaacagagtgagaccctgctccccaaaccccaccaaaaaaaaaaaacaaaaaacaattgttttaaaactgtaaaatacatgcccgtaaagagttcacaattctgagccattggagaacaaaaagtgaaaagggagtctacttatgatgctttgatacagtgctccagatcctgatcaaaatgcattagcaaacacacacatgtaaatgcacggtttttggttagctttacataactgatagacactagtaatactgttctgtgacttcatttcactcaccgtatgttggcaattttactgctcactacaagcttcaaatggctacaaaattccttggtttgaatgtgccatgatttgtttaaccattaatctatttatcagaatgcaattctttcccatttctcattcctacaaagaagactgaaaataaaaatttttgagtaaatatctttggggtttttttttttttttttttttttttgagacagagtctcgctgtgtcactcaggctggagggcaatggcacgatctcggttcactgcaagctccacctcccgggttcacgccattctcctgcctcagcctcccaagtagctgggactataggcgcccgccaccacacctggctaattttttggatttctagtagagacggagtttcactctgttagccaggatggtctcgatctcctgacctcgtgatccgcccaccttggcctcccaaagtgctgggattacaggcgtgagccaccgcaccttgccttgagtaaatatcttaatgtatgtatgcaagtatttcaatagaatagttacctaataatggaattacatattttaagtttgacagattctaccaaattaccctccaaaagagtctaccaatttatccattctcttacagtatataaagtggcccatttccctatccagcagcatttaaacaagctcaagtctccctttaaaagaaaaaaaaaaatccggaggccacgcacagtggctcatgcctgtaatcccagcacttttgtaggccaaggcaggaggaccatttgagcccagaagtttgaggttacagtgggctatgagggcactgctgcactccagcctgggcaacagagtgagaccctgtctctgaaaaaaataaaatcctcccttgatccc

SEQ ID NO: 10128 - DNA, 728 bp, Homo sapiens
caaccttttaatttttttaaaccattttggtgctgtttcttagaccctttttgtatgtacatgaatttaaaaataaaattttgatcatactcacatttatttttttatttcccattatatggataaatattttaagttatcacataacattcaaaatgaatagctgcgtaataatccctttaataagcatgccatagttcacttgcctatcttccagtgaaggcttatttaacaattctccctattttaatcctctatctttgttgctcaggctgatcttgagctcctggcctcaagcaatcctcctgcctcggcctcccaaagtgctgggtttataagcactatctttgtgcatataatcttttatttatattattatttcacccagatagattcacataggtgtgattaggtatggtcattctatggttcttgattcattttaccaaattgctttctgaaagaataagaacaattcacccaggcatgggcaatatatgagaataccctttcagtgagtataaatcacttaatatcctgaatcctaaagtcatgtgatatgaaagaattatcagtgtataggaagcttgggattcccagccccctacgccactccattccacgttgttgacctgaatattctagactcatccttagcttagttttacacggtgcttcctctaggaagtcttcccaggtcaagccccagttcctcttgagagaaatca

SEQ ID NO: 10129 - DNA, 2438 bp, Homo sapiens
gctgcttccgggcttcgcggctcccggcggctccccaaggccgcggccccgacgctgggcccgggagcggtccccgcgcacagcgcccggacgcgtaggtcccgaagtaggcccgcgctttgcttcgtaactggggatctctgaggacatcttagttctgaccttgtggaggccgcgtctctgctgcgtgttcgcgggccagtcgggccactttgtagaaatcatagccctctaaatcaagggacgaacgctgctggctggagtttgctggacactttcattccacctcctaacaaagagaattcctattccttgaggtcccttggggcagcagttaaagactacacgatccaggagcacctaggacctggggccaccttcctgcccgctttattggatggagcactgcctccccagtttctgggacaccttggggtgtggccttggtgagtgaaacttggggtgctgcctgctgggaaggaaatccggaaacgcagagaggactctctggtggtgacccaggccttgtcagatctgagattcttggaatctcagattgtgggggtgtggatggtgaatgaatttgggtatgcccccctttaccccagaactgaagaggaagcaaactacttgccacacttgaggctgcatgactattcagagaagggaggagccacttctgaattcagagtaggactgcatcaccaggcaaatacctgttctgagccagaaagactctggcttctgaggagatcctgagagtctgagtagtgccaggaagcagcctcagaatttgggggcccattacacaccccagccatgttcctgcgacggcttggtggctggctacctcgcccttggggccgccggaaaccaatgaggcctgacccgccttacccagaacccagacgggtggacagctcctcggagaattcaggaagtgactgggatagtgccccagaaaccatggaagatgtggggcatcccaagactaaggactcgggggcattgagggtttctagggctgcttccgaaccaagcaaggaggagccccaagttgagcagctagggagcaaaagaatggattccctcaagtgggaccagcctatctctagcactcaagagtctgggagactggaggctggaggggccagtcccaaactcagatgggatcatgtggattcaggtggcaccaggagaccaggggtgtcccctgaagggggactgagcgtccctgggccaggagccccattggagaaacctggtaggcgtgagaagctgttgggctggctgcggggggaaccaggagctccctcccggtacttggggggcccagaagagtgtctgcagatctccaccaacctgaccctgcatcttctggagctgctggcctctgccctgctggccctgtgctcacgaccactgcgggcagccttggacacactgggcctgcgtggaccgctgggcctctggctacatggcctactgtccttcctggctgccctgcatgggctccatgctgttctgagcctacttactgcccaccctttgcacttcgcctgcctctttggtctcctgcaggccttggtgctggctgtcagcctccgggagcccaatggggatgaggcggccactgactgggagagtgaggggttggagagggaaggtgaggagcagaggggagacccgggaaaggggctgtgaccgtggggtgggggcaaagggtgaagagagtgtgggctttaggagaaaagtgtgaggcatgacccaaattgtaagcatagggacctcagggatggggaagaaacccgagtacgagggtgcagggccccccttcatacacaggagagaacagaactatttagggtgtttgtgtttatggacagtgagggcactgctcttggattcaccagctgttatttttgcttttacttttctcccaccttcagttttttttttttttccacctccactttttaaaagcaaaaaaaaaaaaaagtatgatggtggtgaataaagaccaaagggtcctctctacctttgaaaactctcctggggtggaggagaccagggcaggatagacagacctctgcagtaagagagtggttgggaaacccagggtgttccttggatctcaggatctgagccatcgagggaagagtggggctgctaggcaagtggattagggggtctggatagggccccacaggtgacagggagcctgcagggcggatctggtgatcatgggagccagagggagtggggacagtgcaggcagtattggcaggagggccagtgcagaagggctggtagctcaggcagtgtgggggaagcactgaagcctgtagtccccacttgggggctaggggtttgctcactcagcaataaataactgtgtcacatcaaatcctaaatataccactacaaagtgagagtta

SEQ ID NO: 10130 - DNA, 2199 bp, Homo sapiens
gatgaggattgaaaaattatctttattatcttgagtgggagctggagctggaagtctccagcttctccctccaacaactcagctcccattgtacccatctggggacttagatgaagttacaggtcagttattggacagctcacaggcctctgtgatggggggagggaaaaagaaggacagaagggaagtccagggagaaaagcaaagttgatagtaatggggtgggggagaacgtgttctttcattccctgtgtcaaaggggagtctctaaggctcttttccctccacgtatgaccctctgccccctttatccagtgcaaactcagaaacctctcttttgagtagcccagaacccatcctgcctccctcaggtgacatcacagctcttagccacatccctctggtgacatcacacgagcctctttcaccctgtaacaccagaagacttggtgagtcctaatcctgttttatgagattttaaccccttaccttgattcctaggagtcaataagaaggctttggagtccaggcaggaagtcagggacttgaattcctccacacacttttcgggaggatgtggtgagcgatctggaagggcaaggtggggtcaggccagtcaaaacccctggaagcacctagctcttcctgggagggtgtcataggacccagagtgaggagttctcctgccctcccttgtttccctccaacccttcctgccttgtatccctactcactgtagaggagaaagcgctggtaaccctggcctgtctcattcagcatgattccacctgggcatgagctggaaaagagctcagtcttcatgtcagggcggcctgtcaaggcaggtgggagaagtatgagaacagagatgcagaaccaaactcaaggaagggtgagggctgggaagaaccaaccttcagttttgagatctgtgctcccttcagtcaggtggtagatccatttccggggcacacagagcccatctttcctgcagaggtggtggtggcaaggaggaaagaatgagcatcaccccaaccatagtgtcccagcttcttttttttttttttgagacagagtctcactctgttgcccaggctggagtgcagtggcgccatctcggctcactgcaagctctgcctcccgggttcacgccattctcctgcctcaacctcgtgagtagctgggactacaggtgcccaccaccatgcccagctagttttttatatttttagtagagacggggtttcactgtgttagccaggatggtctcgatctcctgacctcgtgatctgtccgcctcagcctcccaaagtgctgggattacaggcgtgagccaccacgtctggcctgtcccggcttctatttactccattgtatttgttattgaagcccagctctccttgggtttcaagctaccaagcattggttaggcacatctttctccagagggcaattaatacagccactgaattccgtgggccaagcatagtagatataccagctaagaggccagctcttggtgggtggattctcacactttgggcagagactgaacccagtgatgcttctgcctccttaccactcacatgcggatggtagcacgaaggtggagctgcatcggggcagagccagcagccatattgaagacaatgttgtccacagggtcaaaagttgccaactcctccttggtgggagctgcccctgcgataaagtaccactggcccaagtggacctctgggaactggagagacaatgaagggagcaaaagagggtgggttccagcacaggatgggttcaacctcttcatcagtcaaaacagcaagatttaggggtagaggtgttggctgccttcctctttccaactggggattggatccatgacaaagagtcattaaatgacttttcctctttgcccctcaccagtcaacctgggtaaccaccccaccccccaattctgccatgcctctgcattgatggccacagtactgatatttttcttcttgctttcattatcacaacactcacacccccttcctctcttcctttcccaagatggtctccagtcatcctaggccatccacccaagtccctcagagcctccaccataggcttcccccaatctcagtccatacctccttcccatccacgcccagagttgtcagttgactgtgctcagggcactggtagatggagttaagg

SEQ ID NO: 10131 - DNA, 124 bp, Homo sapiens
ctccccagtagctgggattacaggcatgccccaccacgcccagctaattttgtatttttagtagagacggggtttctccatgttggccaagctggtcttgaactcccgacctcaggtgatccgc

SEQ ID NO: 10132 - DNA, 188 bp, Homo sapiens
gagactttgtggggccgaggagaaggcaaagctgccttgcatttgcctggtgcctgctaagccccaagtccatccctcccctgaacaggacgctcgcagggccctgcccgtcagaatgcacgtggagtcctctgaggttcgggggtgtgggttgcacttgagggaccatcttcctggagatcccgtag

SEQ ID NO: 10133 - DNA, 20845 bp, Homo sapiens
ccttcccggggcttgggaatgttctgagcccagcttcctgtcgaagaccgccatcttgctcctacgactcctggtcaccgtggtcccgggcccttctctgaaaaggggcatccccagcccggagcgtgatggaccaatgcgagggcctgagcccgagggtgcggacagtaaaccgtttattactgtgtggacacagacaccgtggtgcatgacagacagtttcaacaccatgagcgctggggacggagctgtgcctggacagctctgcggtgtgtggtggcgccacgctgggccggctgtcaccgccagctgaggcgctaacagcgtcacctgggagaaaacctggaaaccgtctaatgaagcaggtgacttaggggcgtctctagaaacccaaagaaatgtaccttaaataagcaaatataaaacacaaaaaagacgagcagacctggtgttccgtgtcaggcagaatctaaaaaaacccaggagttgcacttggtttcctcactgtcatgtgtgatcacaggtcaggacgtttcacagcagcgcgcccaggctcctgtgcgtgctctggtgcactggagtctggggctggctgggcttctggctgtcctctgtcgccggatgggctcgacgaatcagcgcagcgaggccggccccttacgtggtgctgatcccactcagctcctgcctgatggctgcgggacaggtggcggcggctcaggtgcagccatgaccagtgcagcccggttcctcatcagggccccgcacccctggcgtggacctgcctggtatgtgtccctgttccatctcctgggagccccacccaggctttggcatagacctctggggtgatgaccaaaggctttgggtctcatctgccattccttctgcggcggcccctgctgccactgcccttttaggggaggacctggcgtagggacagaggcctgtgccctgcctgtggcctcactgctgctgaggagtgctgggcaccagaactctggtgtgaggagctgctgtgtggggacgcagggtctctgtaggctctggacaggtgggtgtccaggtgccgggggcccgggagcccttcccccaacatagtggaggctgaggctctgccctcccagctcctgcaggggtcagcaggaaatcttggccctggaccccagggactgccctggctctgctcactcctcaggagaggcagggtcctctcttgcctccccccagcttcctcatcaccccaagctagtgctccaacccccggcctcccaaatttgggcctttccctccttcctctggtatccatcccctcccggactccccctcctctatgtcaactcaggcctctctctggatggaccttgctgggccaagagccaacagccaggagaaggttgtgggggctgggggatgggagctgcttctcagagcccctggtatggcccatgcctacccccgggctctcagccagggtgggttccacctggggctgcacccacagcaggtggagaggctgtggtgggccctgggtttctgacccagctatgcctggggccagacggcacccagcagtaaggcggtgtgaccagttggctgagtgcctgcctatcgcccaggctgcctcattcccctcatttgttaactccttatctccccagcccaggcctttgggggaactggacaaacaggaactgagtgctctctgctcaaacaagggtgggccggctgggggaggaggcctgggtctttgggctcccacctgcctcttccctctgccatcagcctccacccctgtgcgcttgtgggacccttttgccccggtcactgtgatgccctgggggccagacccagctacacacccaggtgtcagcctttatcaccctggttggggaggcacgtggggagctggcactggctgtgctgcatagctcgtccctagactgagtctgccctgcccactcccccttttcctctggctgcagatctgaggcagagcattcaaaggctctgctgggaaccggaaggacggatgtgatgcattgagacccaccctgctctggagccagaggctgctccctgcctgttccccagcccagggccaggcaggctgtgaacgagctcaagcctggaaggtgcttctgtagaccttggtcttcctgtacccccaggaaggcagagtggtcacctcagaagcccaacaccagtgactggaggtggcagtatcaagaaggcagtataaaccgccagggggtggaatgacagcagctcaggtggctcctccagacctggctctggaacgatgctggggtctcccctccatgctcttcccacgtgggtcttccaggaaggtgccggggatgtggaaggtcagattcgggtgtcatgctaccagggagctacaaattcttaggcaagccacttagctttcagctttcctgagcctgtttcctcaactagagatggtaagaatgaaatctctcacagggcccagtgcagtatgggctccagctcaaaactggaggcccccagcctgggtgacagggacccttgtcctgcggccacacctgggtgccaccctccccggtggggctgcactcaccgtcgatgatctcctccttcaccttgtggagctctctcaccacctcctctaggatctcctgttgggagaggagtgtccaggtgaagggacaggcagtggagacggaaaagccggcctgggctgggccatgtccaaagggcttggggtctcctgggcctctccagagttgcatctgtcacccttgtctcctcgtggcccccttcccacgctgaggggggacggcatgggaggcctgggaaaatcctgctgccacctccctcaggtagacgccactgaaactaagggcttcctcggggcagaaagccccagaggcaggcctgagggaggtgcccagaaaggttgagggacatcctagttctggtgatggcaggggctggggacaaaggacaggcttgggcaccccctttctgccgtggctgctccctgactggccttttggcagctacatgtgggcccccagggcctgcctggccatgctggtcagagacggtcccccgcctgctggctgccctcagcctcttgagggaagggcacagggcatgctcacctgcttcatccggtccaagtcgaaggcatccagggccatgtcattcacgctcccagcaggcttcatcctgggagagaaagggcctgtgggtgccctggctggagacaggtgtgggggaaagctggctgtgcagaggccccgctcaggctgggcccacctgctcccctcgctccatagaggctgcttgcttcagactctggccacctcagactgcctgagaaggatttaacgcccgtctccacctcaagaggtctccatggataccgtgactgtatttcccaacccgagagccaaggctggctggggtcaacaaagaaactgctttctgatcagagagctcttatgcagaggtggcaacttaagtgacaacatcgcacccacccgttgcctccctggaaagaaacacagtattgacagcctcctcctcagggtgggagctcatgctccaggttgagcttggggctcggggaagcagcagcggcggcaggaggcacaatgtgaagttgcagagttcacaccggcctggaggcgcgctcctgacacaccagcgcccctggtgctggagcctgctcgggcatagcacacctcccccaagaaacatcctcccatgtggtgtcgctttttttttttcagacagagttttgctcttgttccccagattggagtgcaatggcgcaatcttggctcactgcaacctctgcctcccaggttcaagcaattctcctacctcagcctccccagtagctggcattacaggcatgtgccacttttgtattttcagctaacttttgtattttcagcagagatggggtttcaccatgttggccaagctggtcttgaactcctgacctcacgagatccacccacctgggcctcccagagtgctgggattatgggcgtgagcccctgcacctggctggttttgctctttcaaggtagttctcgtggactacttctttgaaaagtttccaaactaaggtaaccgatttgaattttatttttacttatttgagacagggtctcactctgtcaaccaggctggagtacagaggcgtatcatgcctcactgcagcctcaacctcccaggctcaagtgagcctcccgagtagctgggactacagacatgtgcccttttttttttcttttttaactttttgtagagatggggtctcactgtgttgcccagactggtctccaagtcctgggctcaagtgatcctcccgcctcggcctcccaaagtgctgggatgacaggcatgagcaccgcgctggcctgatttgaatgttaatgtgtcacacatgcatcttccctggaagatcttggcaaaatgcttgtctctctggtcttttaaacatgacttggtgctgaaagacacactgctgggacccaagttccctcccacatggacgggatggaggctggagcccaaggtttcagggaaacgtatgtggcctgtgcccctgggtgtgatcatgggcacacacatttatctggcagggccagccttggctgctgaggggtcatgggcacagaggaggaccatctggtgacactgaggaccagtgttgcccacagccagggagaataaggatgaagaatgagtgttgccacacccctccagatgagctcaagaaagaggccaagcctagccctaaacaggtctgtaagtaattctgggtcctgataggcaaacgcatccagccagagggccctgggtccttcaggcctctcctgtgggttccagaccctgttccagcaacaattgctgggacacctgggccgactgctccacctcgccaggccctggccctctccatctcagccctgacagccacccagtgataaacacagcaggcttcctaagcaatgtgacgcaccagaggggtggtggtacacgttccccttgaagtcatctgaaaattagagaacagatttgcctcagagctgaagagagaccctattccaagcatgaatggccttgacaatgttcctgcccagtgagcgacccttggccactcacaacatggcagcccgcctttgctccaccagcaggacgtggcggagtccgctgggagcgctgcaggctccccttgctgccgtgtctgctccagggccctcgttttgcccactctggttgccttccccttcccagcctccaccatggcaccctgtgcctcaagttccatgactgggccctgcgcatgaacacaatgcaaacttctaactccgcgctcccccacaccctcttcctcacccttcccgttcccctgccccatggcctgtctgcttccaggtggaggtgcgggggagcttggcgggtggctgcaggctcagggccctggcacttacccttccttcagcttgggaggctgtccccatgatctccgcagagcagactcctcctcgtccgggtcaacgaaaatgccagctcccgacagaggcttgccccaccccactccgcaaagcaccctgtcccttccaccatgtggccctgcaccctgtccagagcacccctcaggaccacagtggccttgttcacacggtgctctttgcaggcagggactgtccccagcacacggcctggctgaccacaagccttggacaaaccccagctgactgctaagacttcctcatctctgtccacctgcactgctctgctctcaccacctgttcagctctgcaaggccagtttcaatgcctcctgctctgtgataagggtggtttcccttcaatttgtggtggcgatggagacattcttgacgcaggttctagaggccttccaattcaggccacatgtacctccagatactatgtggctggctgcctctgcctttttgggcaatctcagttccaaatattctatcatgttgtcatgccagcttttggcttgggaaatatggtcagtatgtctgtggggaaactgattctgtgtgccggccgcagaggaaggactctgggctggaggaaaggggtagggctcagcgccagtgctaggactggttgaactgtagggtgcagccctggctagtgaccacaccccatgtccagctgttgctcacagctgtccccaccaccaccctgtgcagcaggggttaacagacctcactttgtggggggaaaacagaggcttggagaggtcccctaacttgcccactgtcacacgtagtgagtccagagctgggactccatgttggcccccccctgcactacctctgtggacaggtcactgccctccttgcccttggtctctctctcagagggaaaagacggagcagctgactgacaggaccccgaggtcctgggtctgaaagaacagaccaccttcgcagagcaagttgttaaatgccaggacgtgagacagcgtgcaagggtgttagtcacgggacgggggacagaggagccccaaaccctgggggacatgtgagcaggagggttgttcggtacctagagtgaggctgcgactgaagggggctcttagcttcggggctctttgccacagacggggttctacggcaatggaatgaaacagacatgtgaatcggcgccagcgcccgcctctgccccaccagcctcgctgctcaggccttcctggggcagctcacctggacagaatcgaggacacaggcttctccaccgagttgctccgctcccagggcttccggccagcctctgtcagttcatttcatggatgaagaacctcacaggtgaagggactcagtagccaccccaatcccctaaacaccccaacaggaagccctcacccatgccaagggtgcagagccccgtggcaggaaggtctgattgagttaagccaaaacctggcaccttgttctcagtcccccatggcctaggtcaggttgaccctgacctgtgatctggttctgagcccttcactgtgccaggtctctctggaatgtgagcctgctggtaagggacccagtgactagagccacagggcgagcaagcacgacctccccggacatcccagcacagccttgctcccacgtgtggtgtggcggccaggcccctcggcccggcacctgctactgaggggctccttagtctgcctcccatgctgcgcctggctctgtcccattctggctggcttgtcttttttaagtggtattggattatattttgttctactccaaaagatttgttgcattaacttgaattcgttgactgtgcaggacaagcagaggcagaagacaaaatctctagggggtagtggggcagctgcctggcccagagctaagccttggcaccctgcggaccaacggtgggattgaggcagttttcctcaaagccaccttctgggacaggcgctgggcctgcaggcactagacctggggctacagacatgtcccaggtgtgtggccttgagcaaaccactttgcacacagatgggaaccacgtagcccactcactgggctgttggaagaagcaaacagggcaggggtattgatcacgttcatcagccaggaacctatgcatcctggcaaatcaagacaccaggcaaaaatcttaggaggagaggacatggcgtgcagtttcacagggaggcgacacccaacctgagcatgccccagagacacacgcgaacagctggcaagagcctcctctgcccagctagggcagcctgatgcccctgtctctcctcgctgtgctcatgagcacaggcctggcacagagcaggtgctgcaaagatgtttgtcgaatgaacaaccaaccctggggtcttcctcccctgcgaagcctcatcatactctcctaactacctcccatctgccacagcttagacagagagaaacctgagccagggaaggggctgcgttttgggtggagcgagatctactgccatctctgtaatgtcggtcatcagctggcgtttcactgggagacatgagtcctgacactgatacctcttaagagcactggccccagcctgcctcaggagccctggacacaaactcccaccctgaatatgtgccgtcaggcaagtgccttctctcgtgcgggactcagggtcctggtgggaaggtgacacgcaggtcaccctggggacccatcacagtggctctgctctagcacttcctgtgctcccacatgggctcctgggggaggctctgggggacccataagaaatgggcttccctgtggcctggccctctgctcaggcatactaaagaggctggatcagagggtcctgtccgaagggtcccccctcccactctgagacctcatgcctcactggggtcagcggggggcgccctctcacctgaggagttaggtggctggctggctgctcgggtccccggagagggggaggtactaggatcttcctaaaatggagaagaagggagtctgtttaggaaggccacctggggccagggcaggacatcattggacacttcataaaacctcagttttccaaatgttcccaatgaacacatatgacttttataattagcaaaacattaaatatttaaaagtgaaaacgcaaaatctcagtggggagagaatcgagccagtggacaaagctggggaaggggaaggctacagggagctacaggctctcagcagggtgatatagaacttccttctggccctcaacacccgcaagccctgagccccccttgggccggatgcctcccgtatgtcatctcactgacttctcatgagcaccccgtggactggcctgctccccctgtgcagcacacacacctgcccgtgtaataggtctgtggcagtgctcgaacagtggacgtgttcatccagcagtggggacacctaacactcatcatgcatggcatgtgcgtcaggatggtttttcagcatcaggaacatgccactgattaagtaataagagtaatccttccacttgatgaagcagaatgcacagcatttgagctgttgacaggcggccacccaacctgatgtgtcattctgatctgaagcaaagaacctctcccttgtcaccgtgggcagaggtctttgctttgtctcctctgctcactacatccccacacgagaatcaggaacgccctgcgtatctgtgtggtgaacgagtaagtcccgggaggctctggtcgagaggcaaaagcaggtgccagcctgcaggtgctgggatgaggttctcaggcctcctcattttaaagacagctgaataacagattatgtcaatcaacacacacatgtgggggccacgatgaaagcgatacagggtgacatcagagtcactaaaaaattatcatcttttcttgtatgttatttttttaaaaccctccctgcttaaaagggaagttatgctttgactctaggctgggaaagaggtggccgcagcactcccaggccctgggcacagagacttgcaccccacctctggcagtcgcacagtctgtgaggcggccatgcctgggtgcaggttttcaggtggtggaactggtcctcggagcagtaactccattggcccagggccagctctgccatggcagagggcctgcccaagtcaccggactccacatttggggctcttttcgtctttcaaataagccttctttcttctctgttaatgataaacttagtgcatgttcactgcagagaattggggaaataccaggaagcatgaacaagaaaacgagtgccggccatcagcctctctccctcccactgcacttgtgtggtgtgtggatcttctgaaggccctgctctctttagacgctagtcctgggtatgagaagggaccatggcaaacaagaaccagctgtagccaggggcctgtgaaaaacaagacagaaaagatgggggtctgaggaggagagtgctatccttggggttgaaggtttcaagaatgttcctcttccagaagcccctgggctttgaaatccattcttcttagagctccaggagcgagagttttagttttcaggggctgggactgcaacatactggcacctgactaagaaaggccagcgatgtcttcagatccccagggctgtggctggagcgaggccacagtattttgatgtctgtgattatcccgtggcctgcaatttcagaaattcatggcaagtcagttggctaaactccacagcatgtgcaaggtatgggaatggtggacgtgtgagaagcccaggcctcgccctccaagggcctaagatctggcaggagacaacgagtctccacaagcagtcgtgcctgtgcagagggcctcgggagaagaccggggctgggatcaagtagtgaggagctttgtgaggcctgggggtcgggaggctgtttttttgttgttgttgtttgttttgtttttgagacggagtctcgttcttgttgcccaggctggagtgcaatggtgcgatctctgctcactacaacctccgcctcccaggttcaagcaattctcctgcctcagcctcccgagtagctgggattacaggcatgcgccaccatgccccgctaattttgtatttttagtagagatgacgtttcactatgttggccaggctggtctcaaactcctgacctcaggtgatccgtctgcctcggcctcccaaagtgctgggactacaagtgtgaagtgttgagccggccgggaggctgttttttaaggtgtaagggtgatgcagggaagtgcaggctgaatgggagttggctggtggggcaaagggacccatatgtgcccaggacggggctgagaggcgtggatcagctgggagggctatagcctcagggtaacaccagcatgaccctgactgatgggaggacagggcaggaagcctgctctggtccctggcagttttatttcctctctgattctgcactgaggtggaaccttcaaggcatttgtagttaaggctaaacttagccctgtcagtaggagtctttttataggaaaagcttaacatggaggaaaagagaattagccgccctaactggaagcagatgttgggagctctggcagccaggctggctctgggctgcctggtaaggacaagagccaggggtccagggctcctttgccacagctcacctgaagctcctgctggaagaggagtctttagaaacagaaataatttgaaaataaaaacctctctgggcttctggcagacgtgcccctctgcagtgtactcctggagtcccagtcccgccgagaccctggctggtctgtgctccccggggctcctgggaaggcgaggtagccctgcggtgcagcggccagcgcctcaggctgcagctccaagggtggagcagtgtctggtagggggtgctcagtgagggcaggcctgctgctggggccagggtggcgcagggacaagcaccgcagagaccctccgcccctcctgtgaatcacctgatgaagcgcccatcccacgcatgtcccaaaggcctcgcctgagaccagagagcctccctggcgatgcgctcatctcagtggggagcctgagggtggggcgggctgcttgctcaccatttggctttcatcttccttcttctcggctggcttgtctgactgggaggctgcttttctcctaggcacagagaaggggaagatacagatcagctcctcacgttctctcactgtcccagaactcttctgcctccaccctgccagactcaccccggtcctcagataaacctgtgtgggaaaacgatggcgtgaaggaggcggcttgtctaggccccgtctggtgaggagccaggcccaggcaaatgtccaggccctccgtgtggtcatggcctgggacacaaaactggtctaggcagagagggcgagatgcctctatgtctgtttagctctactggcagcagctgtagcatctgaggcgtggaggggaggcgggcacgctctgtccccaggacactgaaggcctggccacacgggacagagaggcatctctctgggctgcagtctgtcccacaggtcgggacactggacactttcttgtgtcactctaaggcccttgtgtcttggaactcagttaacccagccacgccctccccaatctagaatgccactcagagcctggaaatgctcagaagaggagccctggaataggtccacgtgacgcccttgagtcggttcgtgcacctccccagtatgaatccccgtttcatgtactctaaaacctcacccatattttttggcctcagtggtatctgctgacctcccaggtctacagaggcaggcagaccctcagtgtttcccagagatacgcttctgtggcttttcaacttgagatgagctgcccatcaagcatggagctggtctgaggtgtgataatgggccgtggccaggctgtcacctgtctgtgatgggcctacctggcagcctcctcagctacagcaggggcccccttctttagctcccatctcaggacaggtctgcccacctcgtccctcagcccagaaaccagggaatcatccctgacaccagcttcttataactgtcagcctggtcagttctctaaatctgggtacctgcctgtcttttttgtcttcaccttcaacaccttcctgcatgcccctatcatctcttcctggactgtcagagtctcctaactggcctagccacgatcacttacacctcaccagctaccccccagcagccagtgtcccatctcctagaaacagaacgctgaccaagccacctgctcacggggagtgtaggcgggatgagtgtctgtgaaagtgctgctgaacaggagctttctgtccacgttcatttccctcctgccctccactgttgggagactcaactgcatgccctcagaggcgggagacaacctacatgaaaagaaacctggcaagggcactttcatcgtcggctccacccagtagccatcactgaggtggatttcagagagcacctgattgatccctgctgagctatgcaaagcatgtttgttcttgggagggccttgactctcccaccggcatctggcatctcactggctcctggcaatactggccttttcctgttctcagacagaaaggtgcttcccctcagcttggtctaggacttagggaaagcattcatattttcttttccaaaactatttctatttctctgtggcccatcctcgcctctgagtgctctgaggtggaacccgatgccctgcaccaggaggctccctcttccagcctgacttttggtccatttcctccacacctagctctccaggcacagggggcgtcagccttcccagccttaccttaactctgcccactgtccctcttacagcacgggacgtcctcatcgttctgcgagccctcccggctctctcacccacggagccattcgcctttgtgtggccactgtaagccccacacacctggacttactctcacaggaaactgctcagaagcctgcctcctgtcttggcgatgtacaaacgcccaggcccagtagaggctccggagacgcccgtgctgcggatccaccttgctgctccctgacacacggggagcctcccctccctgccatctgtgatgcaagcaaagagccccttggcaggaaacccaggctgtggccctgccatgaagcgccacaccagctgcctgcagctgtgggcctctgtcatctcgcatcatcctcatggagccacgggaaggtaatgagaggaactaggactgcagtgtgaagaccctgggcacacagagttctcacttgggtcagccaattggaaggcagctgggagggccaggagaaggcgacaaagtggcagggggtggaggtggggttaccaagggagcagggcccccgctgcagcttcctctgttctggcaggtgaggcctactcccgtgccctctggtgcctaagtgagccacgatattggtagtccaaggtgagcacattcctgatgccaagtcatatttaaaaataaaatccaagctttgcatcccttttgagaaagacctggacgatctccccatctgctcgggtttcatttggggaacagcggagagccacaatggcaggctgcagccacacccgctgcagcgagcagacacacatggccaggtctcaggcccaagagcccggccgggatgtagatggaactactctctctccgtcgctcagggcaatgccctctgggctcctacccttcataactccttctcctgagtcctccataaagaaccctggagaatggggtgccttcaccacacattcaccagagtgtcctctgcaaactcgaccactgcggccacatcttatttctgttaggatcttaagagcaaggactgttctttttcccgcatttatctctgaaattgtctccacatttatctctgctcaggacagggctggtacatggtagatgcttcaggaaatatttgctgagctaaaatgaaggatctggagtttagaggactcctgtgggcttgcgcttcagactaaccccttgggaagggaaaacttaagtaacagtttcccctgcttggctaaacccagggaacaaagattctggggtcaagagaggattctctgtgcagcgctgggggcgggggcaggagcttcctgctaggcacaccaagtctcgggaggtgtagagacccacctcttggccagcagtttgttcatttcctccatgaggcctcctccgccacccccgctgcttgcccggttggcatcggactttgaggtcccactgggactggagcctccagatgcgtcttctggctgaggaaaaaggaggccgcgttttagattctgctgctgatggcagaacaggagcagcaacgatgtgaggggatgcaggggactgtgtgcgtgtgaatcctatggcagcagcactgcaaggggcctcaggggccatctggtccattattctccaaccccacaggggagaaaaccagaatcgagagagggacaaggaccagcccaggtcacacaagtcgcagacactccccaggcctgcagactcatggttagtgtctttgccaagaccagccatgacacatggagggagggagggaggggagaagagactatcctgtgggaaggaaacacaatgtaagccaaaggtctgtattagagctattcttacaagcacagttctagaacatatgagcaagggttagggaagaaacagccgggtggacctagttgccagcatacagcttcctacagtggaaagggcaatggacatagattcaggagacccaggcttgagtccaaaatctgcaatttgtaaacggtgtgacttgagcaaattactcgtgctctttgtgcttcaatttcctcatctctaaagggggacatagttcttgccccacgtgtgaaggtcaacgtgaggctcaaaggctaacttcataatttcaaagtgctgtcccatgtgatttctcgtttgagaacaagtggccaagggccagctagctttgggcagggaagcagtttgctgtgtctcgcagatgcgggaaggaacacaagcgctctgcagatggcacaagggtcccctcggtcccattcccaccccgcacacaggagctcttacccgttggactcttctcagcttggccccagctatggcagcggccagtcctgacatggagctctcgtcgtggctggacccctgggctcctccggctggcagtgggggtgggggaggtggggtagccccagtgggtggaggtgggactgggggtggggggggcggtggaggcccactacatgagacgggggcgctggctgcagatgaaggatgtcctggtgggaggatgggccctgaaacacaacagtgaggctcagccagctccagcacccagctgggggccaagcctgctgctctcagctcaggttccccggaggaaggacaggggcaggctgctccccaaagggatgagaaacagctccaggcctgcttcatccaggaagcctccgcgggatgaacttggctctggcacaattattccctattctggtgtcctcagtactccggggcctggctggacccacaggtgtcctctatttgcttaacattccttgagcccaggcaatttcctcttgctccaatcatgtttttccagggggagaggaagctgtctggttacagtctgtgcctcttctcttctctgctccttctaagcacctagcaccccctaggcagaagttggtcaccaagatccaactgtgactgacacttgggtcgttgggggccgtggcaggtcctgtgggtcccagggccgactgggggcatgggtcagggcgcaatgccgagtgctgggctccagcatcatccatccagccccttccgccagtgctgcctaagcctgttttgtgccaggcactgtgctaggtgctgggtatggtgctgaggaaaaccagccacaagctctctgctcagggtgctcacagcctatgaggaacagtcaacgaatcgcagaggtaaacgcagatggaggactgtggcaagctgacaagtgttaccaagggcaggcacacggcgccatgttggcatacaaagaggggctccagcctggccagaagttcatggaagacggacgtcctccatgacgtcctcacggaagtgactgtggagctgggacacgaccggagagcaggggttcagttaggtgaaggggggaggcaagtgtgaggaaggaggaaaaggatgggaagtgcttgcgaggcactagagggagagagggcaggcacaggctgttccaagagtgatggggaagggacgacatgatgacagtgtcagacctgcatcagaaatgcagactggccggggagcaggaggccagcagcagctaggtgggggtgatggggtcagccagcatctcacgagcagagcgttcctgtaaccagtgggggctcgggtttctcatcagtcaacaggataatagtcacctgctcacttcatagggtgtttgagaaaattaaacaagacaaaggacatgaaagcacttggtaaattatccagtcctttgcctatcagtgaacatgacaatttctggaaaaccctcgtccttctcctttaacgtgctaagctccaccgaacgtccaagacagacgcgtggcagcgcctcctgtgggaagtcttcctgacccaaggtaggccttcagcacctgcacgtcacttgccacagtgttcactacgtgacatgacaagggtgggttcactgtctccttgagtggacagcgggcttcctgagggcaggaactgcatctgcagtcatagttgtgtccccagcccttagcacggtgcctgagacacaggaggtgcttgctgaatgtccactccggagaaggttggcaggtagtggccagacccagctgagcagactccccaagcctctgctctgctctcttgctaccctcaccatctgaagtggtggttgcactttgagacctaggctccccatagctgctcacagagcgccccgtgtgtccctgggcctcatctacgtggaggggctgccacctggcagcagcatgggagtcggccctaggggaggagggctctcacctgtggccgaggttcttctttctagagattcctgacgctgctgctggtgctgctccatcacttgtctggaaagtaatcacagcagggcagtctgactcctccactctggagaccaccacactctgtgcctgtgctgtacccgccggccccggcttcagagtcaggtttcgccagcgctccacaagcgccactgtgtgccacggctgcctccacttaacagaggagggggatgtgactgggtccagctcccgcaagtgggagcaccggctgtctcctgagtctcaggcacactgaacacagagctccttatggaaggccagtgtgattccactccccagagtgaccaagctcttccctgggctagatgggcgcacctggcttttgggagcctgtggcctcaacagacccagcctcaggaacgcctgttcttagtggacctggccaagcttcctgggacagttctcaggtgtgttttggttgccagcagaaatggacacaaaggccacactcctcattttctttaccactgagcggtcataggcccgccttcgtctagagggccatttggtgcaccgtggcacactgctacgtgcacagcagtgggaactcacatcccagtgccttatggcagggtggcctcagggtgctcttaaaggcaagctgagtgaggacactgaggcccagatacatctccagaatccagggatcgagttctggagtgggaggcactttaagaaatcatccaggccacagacagcatcaagagctcagctcgtgtggtgcaaactgaacatgtgctgtggaaacacagggctaaggattgttctgaaggcagctctgggcttggtgggagtgccagaaacatctatttcatggggttcttgtagggtgtatgccttaactaaaacattatggaatggctgggcgtggtggctcacgcctgtaatcacagcactttgggagggtgaggcgggcggatgacgaggccaggagtttgagaccagcctgaccaacatggtgaaaccccatctctactaaaaatacaaaaatgagctgggtgtggtggcgcgcgcctgtaatcccagctactcaaggggctgaggcagaagaatctcttgaacccaggaagtggaggttgcagttagccaagattgcgtcactacactccagcccgggtgacagagcaagactccatctcaaaaaaaaaaaaaaattacggaaaagccccttttagcattaaggtctgaaaagctcccagcagcatctacattagtgtctctgctcaaactgctgaaacctccccagcaggagccacacacctagaacaccatggtaaaatgaggatgtgtgaaaaatactcaagtcaggtctgaacctatggtactgtttggatgcttggagtctctgcgtcactgagtaagtcttgcccctgcccacctccagtaaagttgcgtgggacaagcgagagtctccctgccgtgtgtgtgtgtgtgtgtgtgtgtgtgtgtgtgtgtgtgtattcctgccttggggcaggtgtgtgtgtgtctgtgtgtgtgatcccgtcttggggcaggtgtgtgtgtgtgtgtgtgtgtgtgtattcctgccttggggcaggtgtgtgtgtgtgtgtgtgtgtgtgtgtggtcccgccttggggcaggtgtgtgtgtctgtgtctgtgtgtggtcccaccgtggagcaggtgtgtgtgtgtgtgtctatccacatgtggtctcatcttggggcaggtgtgtgtgtgtgcgcatgtgtgtggtctcgtcttgcagcaggtgtgtgtgtccgtccgtacgtggtctcgtctgggggcagctatgtgtgtggtcctgccttgggacaagtgtatgtgcttgtgtgtgtgtcccctgctgttcacaccccgaccgccaggcggtatgcccattcccggacggccagtgaccccacacagcttggattgggccctggggtacagaattcagcactgcgggtgatgaagcagtttcgagagaaatgaagtacccatttagccatccacgcctgtacgcttacacctggcgtctggtggctcactccttcacgcccttttgtgggtgggaccagccttgggtcccggcagggagctgcagctggagtgagacttgactgccagtctaggttctgcctgactctctggttactctgggcaagtcacttccattctcggcttcagctggctcatggggacaacagtaagaaaagccctgagggtgagtgggtgagacaggtggggagcaaagccaacaccatcttcaaaccgggaaacggaggcttggagcaggaacttgcccaaggttgcaaggcattcatttctcagtcttaggaaaaggccagaggagaggaggtcttgggagaagtccgtatgccatttggtgagaggggtaggtgggggcagaagccggctttcctgactcctagtccagggctggacataagtgtagccacagagagctgcagcttgactccctatctgacaaagctgagtgaggaaggcccgggccaggccctacctccctcgacacagaagaggcagaggacccatcgctgagagggcagacctgggttcaagtcctgactctgccatttcagagcaatgtgaccttgggaggctgctccatggggactcaccacgactctgtaatttcgggacaacagccttggcccttcctcttccccactgtggtaacactttagaagctccatggggtgagggggttcattcctatggtccctagccccatcccatgggcgtgactgccccaacaggctgaatccctcatgcctggactgcctcctgctacgttggggaagggcaagtgaggcaacaagggagcagcacttgggccctgctgggtcaccctgagagccgtcccgctggaggtcagcagcactctctgtagaatgccagactcccacagtcattcctggtcttggtgtccgggaccagcggctgcgcatcggccccctctttcttcctggtctggcttgcaccttgcaccctcccgcagtgtatgcctctaggagtcctggccttggctgctggtgcatcctcacccgctgaaggcacccctggccacccagcctgattgggagatgaccagcctggcccctgcgggtgctgggttaccttctctggatgtccatctcatcaggagaggggccattctgcacctgacgct

SEQ ID NO: 10134 - DNA, 9371 bp, Homo sapiens
ggccggggctgaggctctgtcagtggtaactggtaaaatccaggaccaaactgccagagccacaaggggatcctggggctccatctcccagccacagagctgcccggctgcagggtaaacccatctctgtaacgtacgggggcctggctgctcccagatcttcagtatatatttgtcactggaaatgaaaggcaggtttagtgagcggctggtgagaagctggacacttgccacactttccagatccaactaggtcccagggtgcctcccacactggacagggtcaggcttgtctcttggcacaaaacctcaggtggcagggatggaagctgtgggtaggtggcttcccagagcattaggccagggctgggaggaagaagtttaggaaggaggggattaggagggctttgctgcctttgtgaggagaagcttgtcccaggtcaggttactcagctgtggatgggtggggaagaggccacgttgtatggaagcatttcctgctgtggccaccaggtggcatcgtcaaccctgagcaggtttgtggtggaacagggagctgggaagcaggtggcggcagaggtggaatgttggagggatgatgggcagtgacgggcacctcccatgtggccagtgagtgactgtcatatgatggcatttggcctccctgggaaggtgatacagcaggtctccctagatgttgccagagccagggcttgggggctcactggggcccagtgtggaagagataagaggcccctttgcttttgggagccctgctggggacaagacaaaagtgactttattgccagctagtcaggaggggcaggggtggagtggcctgtgactgggagtaggggtgtggcgtgggggggccctgtctctgctactcttggaggcaagggtacagcagcctctctggcctggctgcctgtttctgatgcggtccctctgctcaatggctcagcagatttgtcaggagcatttctgggcaaaggctgtaacccatcagagtcgcaccagggtgatgcaactgtcctgtgggtgcagggggctttgggctggcctcccttcagcaggccctgcctctggctctgccctctggcattttatgagtgagcctgctaactggtataagtgtgcagacgtttcacaccttggcatctgctgccccttcttctccataggcccctagggaagaccccacctccatgggctcccagccacagaggctgtcagagcagatgccttacagatggagactgaggagacaggtccagagagggacaggggcttgcccaagggcacacaggagtctgactgagcctgatccatgattttttctttctttttttttttttttttgagacgctttgttgccaggctggagtccagtggtgtgattttggctcactgcaacctctgcctcccaggttcaagcaattctcctgcctcagcctcctaagtagctggaactacaggcgcacgccaccttgtccagctgatttttgtatttttagtagagacggggtttcaccatgttggccaggctggttttgaactcctgacctcaagtgatctgcccgtctcagcctcccaaagtgctgggattacaggtgtgagccactgcgcccagatctgatccagaattttctctgggtgctctgtggcagtgtagccaagcactagatcggtgctgatggagtctgagtccacatcggggccttgctcaccattgtgcaggcctggagtcgggggtcctgagttcaagtcttggctcggtcagccttgttgcaccttggtgggcccttctttgcacctcccttgacctcagacccttcctgagtcctgcctggacagggtgacttctagcaacagctgttgttcatggccacctgcccagatgccttgtgcctcacctggggccgctgctggaaaccgtctgtgtgggtctgtgtatcttggttccaggtggctgtgcacgtcgggctctgtgctgccccacggagcagagagccctcaaggcacatgtgtctcccagctactcctgccatccaggctggaggtgtggaagggcagagtcacacctgaggtcagctgagtgcccacagcaggacagagttcccaggctgggccaggtttgggtgtctagccagagcccatgcaggcctgcaattcctcatggggctgccagggagctgtgtctctccctgtccttctctgccttgggctttccccctctcttgtggcccagagaagatggggcccaaggccatggaacccattgactcccactccccagccccacccattctccctgtccccctttctttgaggccctggaagaggccctgtattagtgttctccagagagacagaactgataggatctatgtatctatctctcacatctattatctatctatctatctatctatctatctatctatctatctatctatctatctgtttttgccattactgtcgcccaggctggagtgcagtggtgcaattgcggctcactgcagccccgaactcctgggctcaagcgatcttcccacctcagcctcccaagtagctgggaccacaggcacacaccaccacacctggctgatttttaaactttttgcataataaggccttgctatattgcccaggctgatcctgacctcctgggctcaaggaaacctcctgcctcagcctcccaaagtgctgagattacaatgtaagccaccatgcctggatcaatcgatatatcgatctatcttcctatcttccttccttccctttccctccctccctcccttccttctttccttccatccatccatccatccattcgaagaggggatttattaggggaattggctcatgtgattatggaggctgtaaagtcccatgacagactgtctgcaagctggagacccaggggtggcagtaggggtagcgtggttcagtctgagtctgagggcctcagaaccagggaactcgacggtggaaccctcagtatgatattgaaggcctgaaagcaggcggagggtggagggtgctggtgtagttcctggagtccaaaggctggagttttgatatccaaggactagagaagtgtgtgttgcagctccaagagagggaagtggtgggagaagtagagaaggatgggaggagagagggagggaaagacaggagggagacccttgtctctgcctttttgttctatcggggccctagctgattggatggtgctggcccacattgtgggcgggccttcctcactcagtccacttaccctctgccagtctggaaacaccttgacagacacccagaaataatgctccatagctctcgaggagttcctgagtccccttggcacccagctccagtgacccttgccttctccatgatgcccaccctggcatctccatgacgcccaccctggcatctccatgacgcccaccctggcatctccttcccatcctgccgtcctctggtgcctccctgttgccctccctgccccatgccctaggcagacccaccctcgctacctcatctcaccctcgccttgcctcgggctgtgccggaatggctcctgctgagacaccatgacctggctaagtcgagggacacctgctctctcttcttgtccctgaacctctgtgacccctggcagctgaccacctccaagccctggcttcagttactactccatcctgaccgtacccagggtgacctcagccacgaccctctcctgcacatccagtctgcatggcgtggtcccgagtgttcctggcacgtccccactcccactcccccagggacctgggcgctctggagctgaagatggtagatctttgcaatctttgcaaaaagcgtgggttgttttctcctgtcaaggagtcagtcaactgaccttgggtgggtgcagagtagacccactcctaagacagggcttccggggggcccactggaggctggggtgttcagtgaggcctttctgcccagtgggttgggactcccagcctgtgccacctctggaactccttgggtgcaaagctccagcagctgctgttttcagaactgtcatggagctcctgctccagcaaagcttctctgggcctcaggcctttggcaggagccccctgtacctgcagtgtgggtgtctcgggctccctgagtgccattctctgctcgttcagctccttgggggtccctcagccacgtgctgcagtccagcaggtgcctgcaggcaggtgaggtgacctggggctccctgcatctgttccctccttgagtcgcgccctgtgctgcccatgctcagctgcctcgtgcactgctcagtttttagttacttccagttggtggctcccaagcctgcaagctttgggcctgctcttgttgaaacaagccagggccaggccatcgccccaagaccagcttttcctcttagatcagagcacttcctttaatgacaatagtaccagcttgtgcctactgagtgctggcacccccagggctcagactaatgtgctggccactccacagcctgacgggcatagaggaatggcgtccccatttcccagatgggaagacgcaggctggtgggcccctgctattggccaggtgatggctggggttgggcccctgaggcttgttgggacccgcctgcactaggcctcttgccagatgtgccacactggaaacagcccagagtccactcagaggggacttaggggcatgcctgttggatgggccagcccagtgcctgtttctggggtcccagtggctccggaggccccagcacacccatgggagataggaccagcccatagctggggccgggtgaggggctggtagggtgggcgctgctgtccttctgtgtgcaggtttctcctctctccagtggtccacagtggggcccctgagggaaggctggggcttggaggggcagctgagtcctaggaggtgctgaggaaagcgggaagggcacggggctccctgaaaggcggctgcacagggcacagggagggaccctgagggcgcaccatgtaggcagaacttagcatctttgttcagcagatggggaaagtgaggcccattctccaaggtcagggctgccaggctctgtcatggctctcacctctgaggggtgcagaagtggctgatgcttgcctgcacccaaaagctggaggcctgggctggccctccccagagctgcctgcttgtggctcacctggcacaggtgtggcctgcccctccctcttgccccaaggtttggtctctttccaaggggaagcagcggctggttgcctgtggaatgggggcggggcgggggggggtgttggggtgggagttgggctggagctggccggcccccaggcggattggctactgccctgggggcaggggcgtccctgggtaagagggaggcagtgggcagtggtgccttcggacctgcggtctcagcctacatacagacacacaaaggggactttgcatgcgacttccttggccctgcgcctgggccagagccttcctgagtgggagctgccagcaggtcctccttgccctgcctgacaggagacattgcttccctgcctgggaccactttgctgcgggcgctgggtccccacctcctggctgaggctccccgtgtgcttgagtacacagacggcatcaaggcacagcctctgaatcgtcttcgctggcccagacctgctgggtgggaacaagctgggatgaggcctggctcggggagcagcagggcccatctgccagcgtgggccacatgtgcccctgctggagtcctgccctctgagtctggtgggatgaggctcggccagggtgggggccagcgggccctcgagggacagggcctgtgtgcaggggcaaagggaccagcgaggtttgctggccactcccaccttctcacccctcggccactgcagtgggagcggaggagggcggggtgcagccccaccgagcggggcctcatacctccctgtcttccttgcagccaagtacccggccatcaaggccctgatgcggccagacccgcgcctcaagtgggcggtgctggtgctggtgctggtgcagatgctggcctgctggctggtgcgcgggctggcctggcgctggctgctgttctgggcctacgcctttggtggctgcgtgaaccactcgctgacgctggccatccacgacatctcgcacaacgcggccttcggcacgggccgtgcggcacgcaaccgctggctggccgtgttcgccaacctgcccgtgggtgtgccctacgccgcctccttcaagaagtaccacgtggaccaccaccgctacctgggcggcgacgggctggacgtggacgtgcccacgcgtctggagggctggttcttctgcacacccgcccgcaagctgctctggctggtgctgcagcccttcttctactcactacggccgctctgcgtccaccccaaggccgtgacccgcatggaggtgctcaacacgctggtgcagctggcggccgacctggccatctttgccctttgggggctcaagcccgtggtctacctgctggccagctccttcctgggcctgggcctgcaccccatctcgggccacttcgtggccgagcactacatgttcctcaagggccacgagacctactcctactatgggcctctcaactggatcaccttcaatgtgggctaccacgtggagcaccacgacttccccagcatcccgggctacaacctgccgctggtatgtggctgggctggcagggctgcggcggggcagggctgcacagccatcggaggaggtgggggccctggaagggccttgggccatgcccagcagcctctccctttttgtgctagtcatggcatggccacttgcacttgtccccagggcaggaggaaaggccacacaacacaggcgagtcctctgctggaggctgaagcaaattcagggaggtggggtctgagaggcatttcacagtccaggctgcttgatgccgccatgatactgacagggtgtcttccttgaagaggggcagcattagcaacactgcacgggaagcaccatccttcccgtctgcaggctctttccctgctcattccttgtcattgccctgtgaccctccaggggccagagaggacagggtgggccttgcccttcgcagcccaaggggcttgggcagagctgatggggagtggaagccccgggtatgggcatctttgccttaggagactgggagctggagaatttctgaatgagaaaggaggaaggggaagggggaggaggagccgtccctcagccattgccagcctgtgccttggtagcctctggctgcctggaaagagctggagttacctgtggcaaagggggcgggaggaggtggcactggggaggtgttcgagcgcctgagcgcacgcctctgtgtgcaccggggtgtgcacgtgtctgtgtgtgagcatgtttgccctgtgattatgtgtgggtgcctgcccacgtgcgcaggcatttgcatgtgtgcctgggcgtgcgcacacgcatctgtgtgtggttatgtatttacctggttgtgcaggtgtttgtgcacacgtccctgtatgcgtgtgcactgtggcccgtgtgactctggaatcagaccaaattccaagcctgggccgtggcctgtgccctccattccggctggcagtaccaaggcggtgctctgcaccagggaccatctcacttgaacttcaccacagcccaggaggcagctgcctcctcatccattatccctgttgtatagataaggcagaggcacgggggagaggtgcccgcctcaggaggtgacggggcggaggggagaggtgcccgcctcaggagatggcagagcaagttggcaagagtgcctgccgtgagccatgagcctttacctttcctgagcaaagtgagaggctctgggtgcctggtgctggccccgctgtcctggttttgcggccaggctccctgcgtcctgagagcatccttaggaggtgacagggcaaagagggggcaggaaaggcatcctggggggggggggcagggagggcatccctgtgatgggagctgggccaaggctgcatgccgttgagcagtggggcggcgtggtggtggcgcagttgcgggcgctgaagctgggagcacttcctggaggaagttggtgggggtgtctgtgtagagcaaaggctggaggggacagcaggtgctcaagaggcccttggaacatgacaagcagtgaggctggctgaggccaaggttggcggatcacagggctgagatgcatgggtgtgacactgtggcctggtaggactcaggcgggcactcagcactgcgcaggcgctgcgggagaactcccccgagcagtggggtctgccgggtcagaaggcggggccgagtggagtggtgcaatgaattctgcaactaccacttggggcaggcgctctgagctgagcccgtgggtgcctctgccacagcgtcctgggcgcagttcaggccaccaggccctccagcagccagcgccacgcttccaggcacccaggaagtggtggttggcagggaggaccagaggggtggccttgtgtttggccaagctggacatgggcaccccagaggcgacggtgtgtttgcattatgtacacccatgtgtgtgtgtgggtgtgcgcgcgcgcaaacatgttcgtacatgaatatgcatgtgcatgcccaccgcgtgtgctcaggtgtctgcgtgtgtgctcgcgggtgcggccccgaggagaaccagcccctgagccccgccctcctctctacaggtgcggaagatcgcgcccgagtactacgaccacctgccgcagcaccactcctgggtgaaggtgctctgggattttgtgtttgaggactccctggggccctatgccagggtgaagcgggtgtacaggctggcaaaagatggtctgtgagcccgggctgcctcctggtggtggccattgtcccccatcggcccctcagccttgcaccccagcactgagaagctacatttccttcctgtgctctggactgctgcccttgtccccgaggagtgtcccgcgcagccacacctggcaacagcagtgtgggctgcagggctccgtctgcacgtggacttgccctggaccttgagtgtggccctccctttctgggcctccccaggtgaggcctggccctgccccaccatgacctgggtgctctgagcccacggttcccacggagctgacttctccggggtgcctgtgccctacattaaacccggcgtttgtttcacagcccatggattgtgcttctgagggggtggtctgggcttgagcctggccccagggaatggggcgctgggccgc

SEQ ID NO: 10135 - DNA, 32174 bp, Homo sapiens
  SITE (1295): n equals a,t,g, or c
  SITE (1296): n equals a,t,g, or c
  SITE (1297): n equals a,t,g, or c
  SITE (1298): n equals a,t,g, or c
  SITE (1299): n equals a,t,g, or c
  SITE (1300): n equals a,t,g, or c
  SITE (1301): n equals a,t,g, or c
  SITE (1302): n equals a,t,g, or c
  SITE (1303): n equals a,t,g, or c
  SITE (1304): n equals a,t,g, or c
  SITE (1305): n equals a,t,g, or c
  SITE (1306): n equals a,t,g, or c
  SITE (1307): n equals a,t,g, or c
  SITE (1308): n equals a,t,g, or c
  SITE (1309): n equals a,t,g, or c
  SITE (1310): n equals a,t,g, or c
  SITE (1311): n equals a,t,g, or c
  SITE (1312): n equals a,t,g, or c
  SITE (1313): n equals a,t,g, or c
  SITE (1314): n equals a,t,g, or c
  SITE (1315): n equals a,t,g, or c
  SITE (1316): n equals a,t,g, or c
  SITE (1317): n equals a,t,g, or c
  SITE (1318): n equals a,t,g, or c
  SITE (1319): n equals a,t,g, or c
  SITE (1320): n equals a,t,g, or c
  SITE (1321): n equals a,t,g, or c
  SITE (1322): n equals a,t,g, or c
  SITE (1323): n equals a,t,g, or c
  SITE (1324): n equals a,t,g, or c
  SITE (1325): n equals a,t,g, or c
  SITE (1326): n equals a,t,g, or c
  SITE (1327): n equals a,t,g, or c
  SITE (1328): n equals a,t,g, or c
  SITE (1329): n equals a,t,g, or c
  SITE (1330): n equals a,t,g, or c
  SITE (1331): n equals a,t,g, or c
  SITE (1332): n equals a,t,g, or c
  SITE (1333): n equals a,t,g, or c
  SITE (1334): n equals a,t,g, or c
  SITE (1335): n equals a,t,g, or c
  SITE (1336): n equals a,t,g, or c
  SITE (1337): n equals a,t,g, or c
  SITE (1338): n equals a,t,g, or c
  SITE (1339): n equals a,t,g, or c
  SITE (1340): n equals a,t,g, or c
  SITE (1341): n equals a,t,g, or c
  SITE (1342): n equals a,t,g, or c
  SITE (1343): n equals a,t,g, or c
  SITE (1344): n equals a,t,g, or c
  SITE (1345): n equals a,t,g, or c
  SITE (1346): n equals a,t,g, or c
  SITE (1347): n equals a,t,g, or c
  SITE (1348): n equals a,t,g, or c
  SITE (1349): n equals a,t,g, or c
  SITE (1350): n equals a,t,g, or c
  SITE (1351): n equals a,t,g, or c
  SITE (1352): n equals a,t,g, or c
  SITE (1353): n equals a,t,g, or c
  SITE (1354): n equals a,t,g, or c
  SITE (1355): n equals a,t,g, or c
  SITE (1356): n equals a,t,g, or c
  SITE (1357): n equals a,t,g, or c
  SITE (1358): n equals a,t,g, or c
  SITE (1359): n equals a,t,g, or c
  SITE (1360): n equals a,t,g, or c
  SITE (1361): n equals a,t,g, or c
  SITE (1362): n equals a,t,g, or c
  SITE (1363): n equals a,t,g, or c
  SITE (1364): n equals a,t,g, or c
  SITE (1365): n equals a,t,g, or c
  SITE (1366): n equals a,t,g, or c
  SITE (1367): n equals a,t,g, or c
  SITE (1368): n equals a,t,g, or c
  SITE (1369): n equals a,t,g, or c
  SITE (1370): n equals a,t,g, or c
  SITE (1371): n equals a,t,g, or c
  SITE (1372): n equals a,t,g, or c
  SITE (1373): n equals a,t,g, or c
  SITE (1374): n equals a,t,g, or c
  SITE (1375): n equals a,t,g, or c
  SITE (1376): n equals a,t,g, or c
  SITE (1377): n equals a,t,g, or c
  SITE (1378): n equals a,t,g, or c
  SITE (1379): n equals a,t,g, or c
  SITE (1380): n equals a,t,g, or c
  SITE (1381): n equals a,t,g, or c
  SITE (1382): n equals a,t,g, or c
  SITE (1383): n equals a,t,g, or c
  SITE (1384): n equals a,t,g, or c
  SITE (1385): n equals a,t,g, or c
  SITE (1386): n equals a,t,g, or c
  SITE (1387): n equals a,t,g, or c
  SITE (1388): n equals a,t,g, or c
  SITE (1389): n equals a,t,g, or c
  SITE (1390): n equals a,t,g, or c
  SITE (1391): n equals a,t,g, or c
  SITE (1392): n equals a,t,g, or c
  SITE (1393): n equals a,t,g, or c
  SITE (1394): n equals a,t,g, or c
  SITE (1395): n equals a,t,g, or c
  SITE (1396): n equals a,t,g, or c
  SITE (1397): n equals a,t,g, or c
  SITE (1398): n equals a,t,g, or c
  SITE (1399): n equals a,t,g, or c
  SITE (1400): n equals a,t,g, or c
  SITE (1401): n equals a,t,g, or c
  SITE (1402): n equals a,t,g, or c
  SITE (1403): n equals a,t,g, or c
  SITE (1404): n equals a,t,g, or c
  SITE (1405): n equals a,t,g, or c
  SITE (1406): n equals a,t,g, or c
  SITE (1407): n equals a,t,g, or c
  SITE (1408): n equals a,t,g, or c
  SITE (1409): n equals a,t,g, or c
  SITE (1410): n equals a,t,g, or c
  SITE (1411): n equals a,t,g, or c
  SITE (1412): n equals a,t,g, or c
  SITE (1413): n equals a,t,g, or c
  SITE (1414): n equals a,t,g, or c
  SITE (1415): n equals a,t,g, or c
  SITE (1416): n equals a,t,g, or c
  SITE (1417): n equals a,t,g, or c
  SITE (1418): n equals a,t,g, or c
  SITE (1419): n equals a,t,g, or c
  SITE (1420): n equals a,t,g, or c
  SITE (1421): n equals a,t,g, or c
  SITE (1422): n equals a,t,g, or c
  SITE (1423): n equals a,t,g, or c
  SITE (1424): n equals a,t,g, or c
  SITE (1425): n equals a,t,g, or c
  SITE (1426): n equals a,t,g, or c
  SITE (1427): n equals a,t,g, or c
  SITE (1428): n equals a,t,g, or c
  SITE (1429): n equals a,t,g, or c
  SITE (1430): n equals a,t,g, or c
  SITE (1431): n equals a,t,g, or c
  SITE (1432): n equals a,t,g, or c
  SITE (1433): n equals a,t,g, or c
  SITE (1434): n equals a,t,g, or c
  SITE (1435): n equals a,t,g, or c
  SITE (1436): n equals a,t,g, or c
  SITE (1437): n equals a,t,g, or c
  SITE (1438): n equals a,t,g, or c
  SITE (1439): n equals a,t,g, or c
  SITE (1440): n equals a,t,g, or c
  SITE (1441): n equals a,t,g, or c
  SITE (1442): n equals a,t,g, or c
  SITE (1443): n equals a,t,g, or c
  SITE (1444): n equals a,t,g, or c
  SITE (1445): n equals a,t,g, or c
  SITE (1446): n equals a,t,g, or c
  SITE (1447): n equals a,t,g, or c
  SITE (1448): n equals a,t,g, or c
  SITE (1449): n equals a,t,g, or c
  SITE (1450): n equals a,t,g, or c
  SITE (1451): n equals a,t,g, or c
  SITE (1452): n equals a,t,g, or c
  SITE (1453): n equals a,t,g, or c
  SITE (1454): n equals a,t,g, or c
  SITE (1455): n equals a,t,g, or c
  SITE (1456): n equals a,t,g, or c
  SITE (1457): n equals a,t,g, or c
  SITE (1458): n equals a,t,g, or c
  SITE (1459): n equals a,t,g, or c
  SITE (1460): n equals a,t,g, or c
  SITE (1461): n equals a,t,g, or c
  SITE (1462): n equals a,t,g, or c
  SITE (1463): n equals a,t,g, or c
  SITE (1464): n equals a,t,g, or c
  SITE (1465): n equals a,t,g, or c
  SITE (1466): n equals a,t,g, or c
  SITE (1467): n equals a,t,g, or c
  SITE (1468): n equals a,t,g, or c
  SITE (1469): n equals a,t,g, or c
  SITE (1470): n equals a,t,g, or c
  SITE (1471): n equals a,t,g, or c
  SITE (1472): n equals a,t,g, or c
  SITE (1473): n equals a,t,g, or c
  SITE (1474): n equals a,t,g, or c
  SITE (1475): n equals a,t,g, or c
  SITE (1476): n equals a,t,g, or c
  SITE (1477): n equals a,t,g, or c
  SITE (1478): n equals a,t,g, or c
  SITE (1479): n equals a,t,g, or c
  SITE (1480): n equals a,t,g, or c
  SITE (1481): n equals a,t,g, or c
  SITE (1482): n equals a,t,g, or c
  SITE (1483): n equals a,t,g, or c
  SITE (1484): n equals a,t,g, or c
  SITE (1485): n equals a,t,g, or c
  SITE (1486): n equals a,t,g, or c
  SITE (1487): n equals a,t,g, or c
  SITE (1488): n equals a,t,g, or c
  SITE (1489): n equals a,t,g, or c
  SITE (1490): n equals a,t,g, or c
  SITE (1491): n equals a,t,g, or c
  SITE (1492): n equals a,t,g, or c
  SITE (1493): n equals a,t,g, or c
  SITE (1494): n equals a,t,g, or c
  SITE (1495): n equals a,t,g, or c
  SITE (1496): n equals a,t,g, or c
  SITE (1497): n equals a,t,g, or c
  SITE (1498): n equals a,t,g, or c
  SITE (1499): n equals a,t,g, or c
  SITE (1500): n equals a,t,g, or c
  SITE (1501): n equals a,t,g, or c
  SITE (1502): n equals a,t,g, or c
  SITE (1503): n equals a,t,g, or c
  SITE (1504): n equals a,t,g, or c
  SITE (1505): n equals a,t,g, or c
  SITE (1506): n equals a,t,g, or c
  SITE (1507): n equals a,t,g, or c
  SITE (1508): n equals a,t,g, or c
  SITE (1509): n equals a,t,g, or c
  SITE (1510): n equals a,t,g, or c
  SITE (1511): n equals a,t,g, or c
  SITE (1512): n equals a,t,g, or c
  SITE (1513): n equals a,t,g, or c
  SITE (1514): n equals a,t,g, or c
  SITE (1515): n equals a,t,g, or c
  SITE (1516): n equals a,t,g, or c
  SITE (1517): n equals a,t,g, or c
  SITE (1518): n equals a,t,g, or c
  SITE (1519): n equals a,t,g, or c
  SITE (1520): n equals a,t,g, or c
  SITE (1521): n equals a,t,g, or c
  SITE (1522): n equals a,t,g, or c
  SITE (1523): n equals a,t,g, or c
  SITE (1524): n equals a,t,g, or c
  SITE (1525): n equals a,t,g, or c
  SITE (1526): n equals a,t,g, or c
  SITE (1527): n equals a,t,g, or c
  SITE (1528): n equals a,t,g, or c
  SITE (1529): n equals a,t,g, or c
  SITE (1530): n equals a,t,g, or c
  SITE (1531): n equals a,t,g, or c
  SITE (1532): n equals a,t,g, or c
  SITE (1533): n equals a,t,g, or c
  SITE (1534): n equals a,t,g, or c
  SITE (1535): n equals a,t,g, or c
  SITE (1536): n equals a,t,g, or c
  SITE (1537): n equals a,t,g, or c
  SITE (1538): n equals a,t,g, or c
  SITE (1539): n equals a,t,g, or c
  SITE (1540): n equals a,t,g, or c
  SITE (1541): n equals a,t,g, or c
  SITE (1542): n equals a,t,g, or c
  SITE (1543): n equals a,t,g, or c
  SITE (1544): n equals a,t,g, or c
  SITE (1545): n equals a,t,g, or c
  SITE (1546): n equals a,t,g, or c
  SITE (1547): n equals a,t,g, or c
  SITE (1548): n equals a,t,g, or c
  SITE (1549): n equals a,t,g, or c
  SITE (1550): n equals a,t,g, or c
  SITE (1551): n equals a,t,g, or c
  SITE (1552): n equals a,t,g, or c
  SITE (1553): n equals a,t,g, or c
  SITE (1554): n equals a,t,g, or c
  SITE (1555): n equals a,t,g, or c
  SITE (1556): n equals a,t,g, or c
  SITE (1557): n equals a,t,g, or c
  SITE (1558): n equals a,t,g, or c
  SITE (1559): n equals a,t,g, or c
  SITE (1560): n equals a,t,g, or c
  SITE (1561): n equals a,t,g, or c
  SITE (1562): n equals a,t,g, or c
  SITE (1563): n equals a,t,g, or c
  SITE (1564): n equals a,t,g, or c
  SITE (1565): n equals a,t,g, or c
  SITE (1566): n equals a,t,g, or c
  SITE (1567): n equals a,t,g, or c
  SITE (1568): n equals a,t,g, or c
  SITE (1569): n equals a,t,g, or c
  SITE (1570): n equals a,t,g, or c
  SITE (1571): n equals a,t,g, or c
  SITE (1572): n equals a,t,g, or c
  SITE (1573): n equals a,t,g, or c
  SITE (1574): n equals a,t,g, or c
  SITE (1575): n equals a,t,g, or c
  SITE (1576): n equals a,t,g, or c
  SITE (1577): n equals a,t,g, or c
  SITE (1578): n equals a,t,g, or c
  SITE (1579): n equals a,t,g, or c
  SITE (1580): n equals a,t,g, or c
  SITE (1581): n equals a,t,g, or c
  SITE (1582): n equals a,t,g, or c
  SITE (1583): n equals a,t,g, or c
  SITE (1584): n equals a,t,g, or c
  SITE (1585): n equals a,t,g, or c
  SITE (1586): n equals a,t,g, or c
  SITE (1587): n equals a,t,g, or c
  SITE (1588): n equals a,t,g, or c
  SITE (1589): n equals a,t,g, or c
  SITE (1590): n equals a,t,g, or c
  SITE (1591): n equals a,t,g, or c
  SITE (1592): n equals a,t,g, or c
  SITE (1593): n equals a,t,g, or c
  SITE (1594): n equals a,t,g, or c
  SITE (1595): n equals a,t,g, or c
  SITE (1596): n equals a,t,g, or c
  SITE (1597): n equals a,t,g, or c
  SITE (1598): n equals a,t,g, or c
  SITE (1599): n equals a,t,g, or c
  SITE (1600): n equals a,t,g, or c
  SITE (1601): n equals a,t,g, or c
  SITE (1602): n equals a,t,g, or c
  SITE (1603): n equals a,t,g, or c
  SITE (1604): n equals a,t,g, or c
  SITE (1605): n equals a,t,g, or c
  SITE (1606): n equals a,t,g, or c
  SITE (1607): n equals a,t,g, or c
  SITE (1608): n equals a,t,g, or c
  SITE (1609): n equals a,t,g, or c
  SITE (1610): n equals a,t,g, or c
  SITE (1611): n equals a,t,g, or c
  SITE (1612): n equals a,t,g, or c
  SITE (1613): n equals a,t,g, or c
  SITE (1614): n equals a,t,g, or c
  SITE (1615): n equals a,t,g, or c
  SITE (1616): n equals a,t,g, or c
  SITE (1617): n equals a,t,g, or c
  SITE (1618): n equals a,t,g, or c
  SITE (1619): n equals a,t,g, or c
  SITE (1620): n equals a,t,g, or c
  SITE (1621): n equals a,t,g, or c
  SITE (1622): n equals a,t,g, or c
  SITE (1623): n equals a,t,g, or c
  SITE (1624): n equals a,t,g, or c
  SITE (1625): n equals a,t,g, or c
  SITE (1626): n equals a,t,g, or c
  SITE (1627): n equals a,t,g, or c
  SITE (1628): n equals a,t,g, or c
  SITE (1629): n equals a,t,g, or c
  SITE (1630): n equals a,t,g, or c
  SITE (1631): n equals a,t,g, or c
  SITE (1632): n equals a,t,g, or c
  SITE (1633): n equals a,t,g, or c
  SITE (1634): n equals a,t,g, or c
  SITE (1635): n equals a,t,g, or c
  SITE (1636): n equals a,t,g, or c
  SITE (1637): n equals a,t,g, or c
  SITE (1638): n equals a,t,g, or c
  SITE (1639): n equals a,t,g, or c
  SITE (1640): n equals a,t,g, or c
  SITE (1641): n equals a,t,g, or c
  SITE (1642): n equals a,t,g, or c
  SITE (1643): n equals a,t,g, or c
  SITE (1644): n equals a,t,g, or c
  SITE (1645): n equals a,t,g, or c
  SITE (1646): n equals a,t,g, or c
  SITE (1647): n equals a,t,g, or c
  SITE (1648): n equals a,t,g, or c
  SITE (1649): n equals a,t,g, or c
  SITE (1650): n equals a,t,g, or c
  SITE (1651): n equals a,t,g, or c
  SITE (1652): n equals a,t,g, or c
  SITE (1653): n equals a,t,g, or c
  SITE (1654): n equals a,t,g, or c
  SITE (1655): n equals a,t,g, or c
  SITE (1656): n equals a,t,g, or c
  SITE (1657): n equals a,t,g, or c
  SITE (1658): n equals a,t,g, or c
  SITE (1659): n equals a,t,g, or c
  SITE (1660): n equals a,t,g, or c
  SITE (1661): n equals a,t,g, or c
  SITE (1662): n equals a,t,g, or c
  SITE (1663): n equals a,t,g, or c
  SITE (1664): n equals a,t,g, or c
  SITE (1665): n equals a,t,g, or c
  SITE (1666): n equals a,t,g, or c
  SITE (1667): n equals a,t,g, or c
  SITE (1668): n equals a,t,g, or c
  SITE (1669): n equals a,t,g, or c
  SITE (1670): n equals a,t,g, or c
  SITE (1671): n equals a,t,g, or c
  SITE (1672): n equals a,t,g, or c
  SITE (1673): n equals a,t,g, or c
  SITE (1674): n equals a,t,g, or c
  SITE (1675): n equals a,t,g, or c
  SITE (1676): n equals a,t,g, or c
  SITE (1677): n equals a,t,g, or c
  SITE (1678): n equals a,t,g, or c
  SITE (1679): n equals a,t,g, or c
  SITE (1680): n equals a,t,g, or c
  SITE (1681): n equals a,t,g, or c
  SITE (1682): n equals a,t,g, or c
  SITE (1683): n equals a,t,g, or c
  SITE (1684): n equals a,t,g, or c
  SITE (1685): n equals a,t,g, or c
  SITE (1686): n equals a,t,g, or c
  SITE (1687): n equals a,t,g, or c
  SITE (1688): n equals a,t,g, or c
  SITE (1689): n equals a,t,g, or c
  SITE (1690): n equals a,t,g, or c
  SITE (1691): n equals a,t,g, or c
  SITE (1692): n equals a,t,g, or c
  SITE (1693): n equals a,t,g, or c
  SITE (1694): n equals a,t,g, or c
  SITE (1695): n equals a,t,g, or c
  SITE (1696): n equals a,t,g, or c
  SITE (1697): n equals a,t,g, or c
  SITE (1698): n equals a,t,g, or c
  SITE (1699): n equals a,t,g, or c
  SITE (1700): n equals a,t,g, or c
  SITE (1701): n equals a,t,g, or c
  SITE (1702): n equals a,t,g, or c
  SITE (1703): n equals a,t,g, or c
  SITE (1704): n equals a,t,g, or c
  SITE (1705): n equals a,t,g, or c
  SITE (1706): n equals a,t,g, or c
  SITE (1707): n equals a,t,g, or c
  SITE (1708): n equals a,t,g, or c
  SITE (1709): n equals a,t,g, or c
  SITE (1710): n equals a,t,g, or c
  SITE (1711): n equals a,t,g, or c
  SITE (1712): n equals a,t,g, or c
  SITE (1713): n equals a,t,g, or c
  SITE (1714): n equals a,t,g, or c
  SITE (1715): n equals a,t,g, or c
  SITE (1716): n equals a,t,g, or c
  SITE (1717): n equals a,t,g, or c
  SITE (1718): n equals a,t,g, or c
  SITE (1719): n equals a,t,g, or c
  SITE (1720): n equals a,t,g, or c
  SITE (1721): n equals a,t,g, or c
  SITE (1722): n equals a,t,g, or c
  SITE (1723): n equals a,t,g, or c
  SITE (1724): n equals a,t,g, or c
  SITE (1725): n equals a,t,g, or c
  SITE (1726): n equals a,t,g, or c
  SITE (1727): n equals a,t,g, or c
  SITE (1728): n equals a,t,g, or c
  SITE (1729): n equals a,t,g, or c
  SITE (1730): n equals a,t,g, or c
  SITE (1731): n equals a,t,g, or c
  SITE (1732): n equals a,t,g, or c
  SITE (1733): n equals a,t,g, or c
  SITE (1734): n equals a,t,g, or c
  SITE (1735): n equals a,t,g, or c
  SITE (1736): n equals a,t,g, or c
  SITE (1737): n equals a,t,g, or c
  SITE (1738): n equals a,t,g, or c
  SITE (1739): n equals a,t,g, or c
  SITE (1740): n equals a,t,g, or c
  SITE (1741): n equals a,t,g, or c
  SITE (1742): n equals a,t,g, or c
  SITE (1743): n equals a,t,g, or c
  SITE (1744): n equals a,t,g, or c
  SITE (1745): n equals a,t,g, or c
  SITE (1746): n equals a,t,g, or c
  SITE (1747): n equals a,t,g, or c
  SITE (1748): n equals a,t,g, or c
  SITE (1749): n equals a,t,g, or c
  SITE (1750): n equals a,t,g, or c
  SITE (1751): n equals a,t,g, or c
  SITE (1752): n equals a,t,g, or c
  SITE (1753): n equals a,t,g, or c
  SITE (1754): n equals a,t,g, or c
  SITE (1755): n equals a,t,g, or c
  SITE (1756): n equals a,t,g, or c
  SITE (1757): n equals a,t,g, or c
  SITE (1758): n equals a,t,g, or c
  SITE (1759): n equals a,t,g, or c
  SITE (1760): n equals a,t,g, or c
  SITE (1761): n equals a,t,g, or c
  SITE (1762): n equals a,t,g, or c
  SITE (1763): n equals a,t,g, or c
  SITE (1764): n equals a,t,g, or c
  SITE (1765): n equals a,t,g, or c
  SITE (1766): n equals a,t,g, or c
  SITE (1767): n equals a,t,g, or c
  SITE (1768): n equals a,t,g, or c
  SITE (1769): n equals a,t,g, or c
  SITE (1770): n equals a,t,g, or c
  SITE (1771): n equals a,t,g, or c
  SITE (1772): n equals a,t,g, or c
  SITE (1773): n equals a,t,g, or c
  SITE (1774): n equals a,t,g, or c
  SITE (1775): n equals a,t,g, or c
  SITE (1776): n equals a,t,g, or c
  SITE (1777): n equals a,t,g, or c
  SITE (1778): n equals a,t,g, or c
  SITE (1779): n equals a,t,g, or c
  SITE (1780): n equals a,t,g, or c
  SITE (1781): n equals a,t,g, or c
  SITE (1782): n equals a,t,g, or c
  SITE (1783): n equals a,t,g, or c
  SITE (1784): n equals a,t,g, or c
  SITE (1785): n equals a,t,g, or c
  SITE (1786): n equals a,t,g, or c
  SITE (1787): n equals a,t,g, or c
  SITE (1788): n equals a,t,g, or c
  SITE (1789): n equals a,t,g, or c
  SITE (1790): n equals a,t,g, or c
  SITE (1791): n equals a,t,g, or c
  SITE (1792): n equals a,t,g, or c
  SITE (1793): n equals a,t,g, or c
  SITE (1794): n equals a,t,g, or c
  SITE (1795): n equals a,t,g, or c
  SITE (1796): n equals a,t,g, or c
  SITE (1797): n equals a,t,g, or c
  SITE (1798): n equals a,t,g, or c
  SITE (1799): n equals a,t,g, or c
  SITE (1800): n equals a,t,g, or c
  SITE (1801): n equals a,t,g, or c
  SITE (1802): n equals a,t,g, or c
  SITE (1803): n equals a,t,g, or c
  SITE (1804): n equals a,t,g, or c
  SITE (1805): n equals a,t,g, or c
  SITE (1806): n equals a,t,g, or c
  SITE (1807): n equals a,t,g, or c
  SITE (1808): n equals a,t,g, or c
  SITE (1809): n equals a,t,g, or c
  SITE (1810): n equals a,t,g, or c
  SITE (1811): n equals a,t,g, or c
  SITE (1812): n equals a,t,g, or c
  SITE (1813): n equals a,t,g, or c
  SITE (1814): n equals a,t,g, or c
  SITE (1815): n equals a,t,g, or c
  SITE (1816): n equals a,t,g, or c
  SITE (1817): n equals a,t,g, or c
  SITE (1818): n equals a,t,g, or c
  SITE (1819): n equals a,t,g, or c
  SITE (1820): n equals a,t,g, or c
  SITE (1821): n equals a,t,g, or c
  SITE (1822): n equals a,t,g, or c
  SITE (1823): n equals a,t,g, or c
  SITE (1824): n equals a,t,g, or c
  SITE (1825): n equals a,t,g, or c
  SITE (1826): n equals a,t,g, or c
  SITE (1827): n equals a,t,g, or c
  SITE (1828): n equals a,t,g, or c
  SITE (1829): n equals a,t,g, or c
  SITE (1830): n equals a,t,g, or c
  SITE (1831): n equals a,t,g, or c
  SITE (1832): n equals a,t,g, or c
  SITE (1833): n equals a,t,g, or c
  SITE (1834): n equals a,t,g, or c
  SITE (1835): n equals a,t,g, or c
  SITE (1836): n equals a,t,g, or c
  SITE (1837): n equals a,t,g, or c
  SITE (1838): n equals a,t,g, or c
  SITE (1839): n equals a,t,g, or c
  SITE (1840): n equals a,t,g, or c
  SITE (1841): n equals a,t,g, or c
  SITE (1842): n equals a,t,g, or c
  SITE (1843): n equals a,t,g, or c
  SITE (1844): n equals a,t,g, or c
  SITE (1845): n equals a,t,g, or c
  SITE (1846): n equals a,t,g, or c
  SITE (1847): n equals a,t,g, or c
  SITE (1848): n equals a,t,g, or c
  SITE (1849): n equals a,t,g, or c
  SITE (1850): n equals a,t,g, or c
  SITE (1851): n equals a,t,g, or c
  SITE (1852): n equals a,t,g, or c
  SITE (1853): n equals a,t,g, or c
  SITE (1854): n equals a,t,g, or c
  SITE (1855): n equals a,t,g, or c
  SITE (1856): n equals a,t,g, or c
  SITE (1857): n equals a,t,g, or c
  SITE (1858): n equals a,t,g, or c
  SITE (1859): n equals a,t,g, or c
  SITE (1860): n equals a,t,g, or c
  SITE (1861): n equals a,t,g, or c
  SITE (1862): n equals a,t,g, or c
  SITE (1863): n equals a,t,g, or c
  SITE (1864): n equals a,t,g, or c
  SITE (1865): n equals a,t,g, or c
  SITE (1866): n equals a,t,g, or c
  SITE (1867): n equals a,t,g, or c
  SITE (1868): n equals a,t,g, or c
  SITE (1869): n equals a,t,g, or c
  SITE (1870): n equals a,t,g, or c
  SITE (1871): n equals a,t,g, or c
  SITE (1872): n equals a,t,g, or c
  SITE (1873): n equals a,t,g, or c
  SITE (1874): n equals a,t,g, or c
  SITE (1875): n equals a,t,g, or c
  SITE (1876): n equals a,t,g, or c
  SITE (1877): n equals a,t,g, or c
  SITE (1878): n equals a,t,g, or c
  SITE (1879): n equals a,t,g, or c
  SITE (1880): n equals a,t,g, or c
  SITE (1881): n equals a,t,g, or c
  SITE (1882): n equals a,t,g, or c
  SITE (1883): n equals a,t,g, or c
  SITE (1884): n equals a,t,g, or c
  SITE (1885): n equals a,t,g, or c
  SITE (1886): n equals a,t,g, or c
  SITE (1887): n equals a,t,g, or c
  SITE (1888): n equals a,t,g, or c
  SITE (1889): n equals a,t,g, or c
  SITE (1890): n equals a,t,g, or c
  SITE (1891): n equals a,t,g, or c
  SITE (1892): n equals a,t,g, or c
  SITE (1893): n equals a,t,g, or c
  SITE (1894): n equals a,t,g, or c
  SITE (1895): n equals a,t,g, or c
  SITE (1896): n equals a,t,g, or c
  SITE (1897): n equals a,t,g, or c
  SITE (1898): n equals a,t,g, or c
  SITE (1899): n equals a,t,g, or c
  SITE (1900): n equals a,t,g, or c
  SITE (1901): n equals a,t,g, or c
  SITE (1902): n equals a,t,g, or c
  SITE (1903): n equals a,t,g, or c
  SITE (1904): n equals a,t,g, or c
  SITE (1905): n equals a,t,g, or c
  SITE (1906): n equals a,t,g, or c
  SITE (1907): n equals a,t,g, or c
  SITE (1908): n equals a,t,g, or c
  SITE (1909): n equals a,t,g, or c
  SITE (1910): n equals a,t,g, or c
  SITE (1911): n equals a,t,g, or c
  SITE (1912): n equals a,t,g, or c
  SITE (1913): n equals a,t,g, or c
  SITE (1914): n equals a,t,g, or c
  SITE (1915): n equals a,t,g, or c
  SITE (1916): n equals a,t,g, or c
  SITE (1917): n equals a,t,g, or c
  SITE (1918): n equals a,t,g, or c
  SITE (1919): n equals a,t,g, or c
  SITE (1920): n equals a,t,g, or c
  SITE (1921): n equals a,t,g, or c
  SITE (1922): n equals a,t,g, or c
  SITE (1923): n equals a,t,g, or c
  SITE (1924): n equals a,t,g, or c
  SITE (1925): n equals a,t,g, or c
  SITE (1926): n equals a,t,g, or c
  SITE (1927): n equals a,t,g, or c
  SITE (1928): n equals a,t,g, or c
  SITE (1929): n equals a,t,g, or c
  SITE (1930): n equals a,t,g, or c
  SITE (1931): n equals a,t,g, or c
  SITE (1932): n equals a,t,g, or c
  SITE (1933): n equals a,t,g, or c
  SITE (1934): n equals a,t,g, or c
  SITE (1935): n equals a,t,g, or c
  SITE (1936): n equals a,t,g, or c
  SITE (1937): n equals a,t,g, or c
  SITE (1938): n equals a,t,g, or c
  SITE (1939): n equals a,t,g, or c
  SITE (1940): n equals a,t,g, or c
  SITE (1941): n equals a,t,g, or c
  SITE (1942): n equals a,t,g, or c
  SITE (1943): n equals a,t,g, or c
  SITE (1944): n equals a,t,g, or c
  SITE (1945): n equals a,t,g, or c
  SITE (1946): n equals a,t,g, or c
  SITE (1947): n equals a,t,g, or c
  SITE (1948): n equals a,t,g, or c
  SITE (1949): n equals a,t,g, or c
  SITE (1950): n equals a,t,g, or c
  SITE (1951): n equals a,t,g, or c
  SITE (1952): n equals a,t,g, or c
  SITE (1953): n equals a,t,g, or c
  SITE (1954): n equals a,t,g, or c
  SITE (1955): n equals a,t,g, or c
  SITE (1956): n equals a,t,g, or c
  SITE (1957): n equals a,t,g, or c
  SITE (1958): n equals a,t,g, or c
  SITE (1959): n equals a,t,g, or c
  SITE (1960): n equals a,t,g, or c
  SITE (1961): n equals a,t,g, or c
  SITE (1962): n equals a,t,g, or c
  SITE (1963): n equals a,t,g, or c
  SITE (1964): n equals a,t,g, or c
  SITE (1965): n equals a,t,g, or c
  SITE (1966): n equals a,t,g, or c
  SITE (1967): n equals a,t,g, or c
  SITE (1968): n equals a,t,g, or c
  SITE (1969): n equals a,t,g, or c
  SITE (1970): n equals a,t,g, or c
  SITE (1971): n equals a,t,g, or c
  SITE (1972): n equals a,t,g, or c
  SITE (1973): n equals a,t,g, or c
  SITE (1974): n equals a,t,g, or c
  SITE (1975): n equals a,t,g, or c
  SITE (1976): n equals a,t,g, or c
  SITE (1977): n equals a,t,g, or c
  SITE (1978): n equals a,t,g, or c
  SITE (1979): n equals a,t,g, or c
  SITE (1980): n equals a,t,g, or c
  SITE (1981): n equals a,t,g, or c
  SITE (1982): n equals a,t,g, or c
  SITE (1983): n equals a,t,g, or c
  SITE (1984): n equals a,t,g, or c
  SITE (1985): n equals a,t,g, or c
  SITE (1986): n equals a,t,g, or c
  SITE (1987): n equals a,t,g, or c
  SITE (1988): n equals a,t,g, or c
  SITE (1989): n equals a,t,g, or c
  SITE (1990): n equals a,t,g, or c
  SITE (1991): n equals a,t,g, or c
  SITE (1992): n equals a,t,g, or c
  SITE (1993): n equals a,t,g, or c
  SITE (1994): n equals a,t,g, or c
  SITE (1995): n equals a,t,g, or c
  SITE (1996): n equals a,t,g, or c
  SITE (1997): n equals a,t,g, or c
  SITE (1998): n equals a,t,g, or c
  SITE (1999): n equals a,t,g, or c
  SITE (2000): n equals a,t,g, or c
  SITE (2001): n equals a,t,g, or c
  SITE (2002): n equals a,t,g, or c
  SITE (2003): n equals a,t,g, or c
  SITE (2004): n equals a,t,g, or c
  SITE (2005): n equals a,t,g, or c
  SITE (2006): n equals a,t,g, or c
  SITE (2007): n equals a,t,g, or c
  SITE (2008): n equals a,t,g, or c
  SITE (2009): n equals a,t,g, or c
  SITE (2010): n equals a,t,g, or c
  SITE (2011): n equals a,t,g, or c
  SITE (2012): n equals a,t,g, or c
  SITE (2013): n equals a,t,g, or c
  SITE (2014): n equals a,t,g, or c
  SITE (2015): n equals a,t,g, or c
  SITE (2016): n equals a,t,g, or c
  SITE (2017): n equals a,t,g, or c
  SITE (2018): n equals a,t,g, or c
  SITE (2019): n equals a,t,g, or c
  SITE (2020): n equals a,t,g, or c
  SITE (2021): n equals a,t,g, or c
  SITE (2022): n equals a,t,g, or c
  SITE (2023): n equals a,t,g, or c
  SITE (2024): n equals a,t,g, or c
  SITE (2025): n equals a,t,g, or c
  SITE (2026): n equals a,t,g, or c
  SITE (2027): n equals a,t,g, or c
  SITE (2028): n equals a,t,g, or c
  SITE (2029): n equals a,t,g, or c
  SITE (2030): n equals a,t,g, or c
  SITE (2031): n equals a,t,g, or c
  SITE (2032): n equals a,t,g, or c
  SITE (2033): n equals a,t,g, or c
  SITE (2034): n equals a,t,g, or c
  SITE (2035): n equals a,t,g, or c
  SITE (2036): n equals a,t,g, or c
  SITE (2037): n equals a,t,g, or c
  SITE (2038): n equals a,t,g, or c
  SITE (2039): n equals a,t,g, or c
  SITE (2040): n equals a,t,g, or c
  SITE (2041): n equals a,t,g, or c
  SITE (2042): n equals a,t,g, or c
  SITE (2043): n equals a,t,g, or c
  SITE (2044): n equals a,t,g, or c
  SITE (2045): n equals a,t,g, or c
  SITE (2046): n equals a,t,g, or c
  SITE (2047): n equals a,t,g, or c
  SITE (2048): n equals a,t,g, or c
  SITE (2049): n equals a,t,g, or c
  SITE (2050): n equals a,t,g, or c
  SITE (2051): n equals a,t,g, or c
  SITE (2052): n equals a,t,g, or c
  SITE (2053): n equals a,t,g, or c
  SITE (2054): n equals a,t,g, or c
  SITE (2055): n equals a,t,g, or c
  SITE (2056): n equals a,t,g, or c
  SITE (2057): n equals a,t,g, or c
  SITE (2058): n equals a,t,g, or c
  SITE (2059): n equals a,t,g, or c
  SITE (2060): n equals a,t,g, or c
  SITE (2061): n equals a,t,g, or c
  SITE (2062): n equals a,t,g, or c
  SITE (2063): n equals a,t,g, or c
  SITE (2064): n equals a,t,g, or c
  SITE (2065): n equals a,t,g, or c
  SITE (2066): n equals a,t,g, or c
  SITE (2067): n equals a,t,g, or c
  SITE (2068): n equals a,t,g, or c
  SITE (2069): n equals a,t,g, or c
  SITE (2070): n equals a,t,g, or c
  SITE (2071): n equals a,t,g, or c
  SITE (2072): n equals a,t,g, or c
  SITE (2073): n equals a,t,g, or c
  SITE (2074): n equals a,t,g, or c
  SITE (2075): n equals a,t,g, or c
  SITE (2076): n equals a,t,g, or c
  SITE (2077): n equals a,t,g, or c
  SITE (2078): n equals a,t,g, or c
  SITE (2079): n equals a,t,g, or c
  SITE (2080): n equals a,t,g, or c
  SITE (2081): n equals a,t,g, or c
  SITE (2082): n equals a,t,g, or c
  SITE (2083): n equals a,t,g, or c
  SITE (2084): n equals a,t,g, or c
  SITE (2085): n equals a,t,g, or c
  SITE (2086): n equals a,t,g, or c
  SITE (2087): n equals a,t,g, or c
  SITE (2088): n equals a,t,g, or c
  SITE (2089): n equals a,t,g, or c
  SITE (2090): n equals a,t,g, or c
  SITE (2091): n equals a,t,g, or c
  SITE (2092): n equals a,t,g, or c
  SITE (2093): n equals a,t,g, or c
  SITE (2094): n equals a,t,g, or c
  SITE (2095): n equals a,t,g, or c
  SITE (2096): n equals a,t,g, or c
  SITE (2097): n equals a,t,g, or c
  SITE (2098): n equals a,t,g, or c
  SITE (2099): n equals a,t,g, or c
  SITE (2100): n equals a,t,g, or c
  SITE (2101): n equals a,t,g, or c
  SITE (2102): n equals a,t,g, or c
  SITE (2103): n equals a,t,g, or c
  SITE (2104): n equals a,t,g, or c
  SITE (2105): n equals a,t,g, or c
  SITE (2106): n equals a,t,g, or c
  SITE (2107): n equals a,t,g, or c
  SITE (2108): n equals a,t,g, or c
  SITE (2109): n equals a,t,g, or c
  SITE (2110): n equals a,t,g, or c
  SITE (2111): n equals a,t,g, or c
  SITE (2112): n equals a,t,g, or c
  SITE (2113): n equals a,t,g, or c
  SITE (2114): n equals a,t,g, or c
  SITE (2115): n equals a,t,g, or c
  SITE (2116): n equals a,t,g, or c
  SITE (2117): n equals a,t,g, or c
  SITE (2118): n equals a,t,g, or c
  SITE (2119): n equals a,t,g, or c
  SITE (2120): n equals a,t,g, or c
  SITE (2121): n equals a,t,g, or c
  SITE (2122): n equals a,t,g, or c
  SITE (2123): n equals a,t,g, or c
  SITE (2124): n equals a,t,g, or c
  SITE (2125): n equals a,t,g, or c
  SITE (2126): n equals a,t,g, or c
  SITE (2127): n equals a,t,g, or c
  SITE (2128): n equals a,t,g, or c
  SITE (2129): n equals a,t,g, or c
  SITE (2130): n equals a,t,g, or c
  SITE (2131): n equals a,t,g, or c
  SITE (2132): n equals a,t,g, or c
  SITE (2133): n equals a,t,g, or c
  SITE (2134): n equals a,t,g, or c
  SITE (2135): n equals a,t,g, or c
  SITE (2136): n equals a,t,g, or c
  SITE (2137): n equals a,t,g, or c
  SITE (2138): n equals a,t,g, or c
  SITE (2139): n equals a,t,g, or c
  SITE (2140): n equals a,t,g, or c
  SITE (2141): n equals a,t,g, or c
  SITE (2142): n equals a,t,g, or c
  SITE (2143): n equals a,t,g, or c
  SITE (2144): n equals a,t,g, or c
  SITE (2145): n equals a,t,g, or c
  SITE (2146): n equals a,t,g, or c
  SITE (2147): n equals a,t,g, or c
  SITE (2148): n equals a,t,g, or c
  SITE (2149): n equals a,t,g, or c
  SITE (2150): n equals a,t,g, or c
  SITE (2151): n equals a,t,g, or c
  SITE (2152): n equals a,t,g, or c
  SITE (2153): n equals a,t,g, or c
  SITE (2154): n equals a,t,g, or c
  SITE (2155): n equals a,t,g, or c
  SITE (2156): n equals a,t,g, or c
  SITE (2157): n equals a,t,g, or c
  SITE (2158): n equals a,t,g, or c
  SITE (2159): n equals a,t,g, or c
  SITE (2160): n equals a,t,g, or c
  SITE (2161): n equals a,t,g, or c
  SITE (2162): n equals a,t,g, or c
  SITE (2163): n equals a,t,g, or c
  SITE (2164): n equals a,t,g, or c
  SITE (2165): n equals a,t,g, or c
  SITE (2166): n equals a,t,g, or c
  SITE (2167): n equals a,t,g, or c
  SITE (2168): n equals a,t,g, or c
  SITE (2169): n equals a,t,g, or c
  SITE (2170): n equals a,t,g, or c
  SITE (2171): n equals a,t,g, or c
  SITE (2172): n equals a,t,g, or c
  SITE (2173): n equals a,t,g, or c
  SITE (2174): n equals a,t,g, or c
  SITE (2175): n equals a,t,g, or c
  SITE (2176): n equals a,t,g, or c
  SITE (2177): n equals a,t,g, or c
  SITE (2178): n equals a,t,g, or c
  SITE (2179): n equals a,t,g, or c
  SITE (2180): n equals a,t,g, or c
  SITE (2181): n equals a,t,g, or c
  SITE (2182): n equals a,t,g, or c
  SITE (2183): n equals a,t,g, or c
  SITE (2184): n equals a,t,g, or c
  SITE (2185): n equals a,t,g, or c
  SITE (2186): n equals a,t,g, or c
  SITE (2187): n equals a,t,g, or c
  SITE (2188): n equals a,t,g, or c
  SITE (2189): n equals a,t,g, or c
  SITE (2190): n equals a,t,g, or c
  SITE (2191): n equals a,t,g, or c
  SITE (2192): n equals a,t,g, or c
  SITE (2193): n equals a,t,g, or c
  SITE (2194): n equals a,t,g, or c
  SITE (2195): n equals a,t,g, or c
  SITE (2196): n equals a,t,g, or c
  SITE (2197): n equals a,t,g, or c
  SITE (2198): n equals a,t,g, or c
  SITE (2199): n equals a,t,g, or c
  SITE (2200): n equals a,t,g, or c
  SITE (2201): n equals a,t,g, or c
  SITE (2202): n equals a,t,g, or c
  SITE (2203): n equals a,t,g, or c
  SITE (2204): n equals a,t,g, or c
  SITE (2205): n equals a,t,g, or c
  SITE (2206): n equals a,t,g, or c
  SITE (2207): n equals a,t,g, or c
  SITE (2208): n equals a,t,g, or c
  SITE (2209): n equals a,t,g, or c
  SITE (2210): n equals a,t,g, or c
  SITE (2211): n equals a,t,g, or c
  SITE (2212): n equals a,t,g, or c
  SITE (2213): n equals a,t,g, or c
  SITE (2214): n equals a,t,g, or c
  SITE (2215): n equals a,t,g, or c
  SITE (2216): n equals a,t,g, or c
  SITE (2217): n equals a,t,g, or c
  SITE (2218): n equals a,t,g, or c
  SITE (2219): n equals a,t,g, or c
  SITE (2220): n equals a,t,g, or c
  SITE (2221): n equals a,t,g, or c
  SITE (2222): n equals a,t,g, or c
  SITE (2223): n equals a,t,g, or c
  SITE (2224): n equals a,t,g, or c
  SITE (2225): n equals a,t,g, or c
  SITE (2226): n equals a,t,g, or c
  SITE (2227): n equals a,t,g, or c
  SITE (2228): n equals a,t,g, or c
  SITE (2229): n equals a,t,g, or c
  SITE (2230): n equals a,t,g, or c
  SITE (2231): n equals a,t,g, or c
  SITE (2232): n equals a,t,g, or c
  SITE (2233): n equals a,t,g, or c
  SITE (2234): n equals a,t,g, or c
  SITE (2235): n equals a,t,g, or c
  SITE (2236): n equals a,t,g, or c
  SITE (2237): n equals a,t,g, or c
  SITE (2238): n equals a,t,g, or c
  SITE (2239): n equals a,t,g, or c
  SITE (2240): n equals a,t,g, or c
  SITE (2241): n equals a,t,g, or c
  SITE (2242): n equals a,t,g, or c
  SITE (2243): n equals a,t,g, or c
  SITE (2244): n equals a,t,g, or c
  SITE (2245): n equals a,t,g, or c
  SITE (2246): n equals a,t,g, or c
  SITE (2247): n equals a,t,g, or c
  SITE (2248): n equals a,t,g, or c
  SITE (2249): n equals a,t,g, or c
  SITE (2250): n equals a,t,g, or c
  SITE (2251): n equals a,t,g, or c
  SITE (2252): n equals a,t,g, or c
  SITE (2253): n equals a,t,g, or c
  SITE (2254): n equals a,t,g, or c
  SITE (2255): n equals a,t,g, or c
  SITE (2256): n equals a,t,g, or c
  SITE (2257): n equals a,t,g, or c
  SITE (2258): n equals a,t,g, or c
  SITE (2259): n equals a,t,g, or c
  SITE (2260): n equals a,t,g, or c
  SITE (2261): n equals a,t,g, or c
  SITE (2262): n equals a,t,g, or c
  SITE (2263): n equals a,t,g, or c
  SITE (2264): n equals a,t,g, or c
  SITE (2265): n equals a,t,g, or c
  SITE (2266): n equals a,t,g, or c
  SITE (2267): n equals a,t,g, or c
  SITE (2268): n equals a,t,g, or c
  SITE (2269): n equals a,t,g, or c
  SITE (2270): n equals a,t,g, or c
  SITE (2271): n equals a,t,g, or c
  SITE (2272): n equals a,t,g, or c
  SITE (2273): n equals a,t,g, or c
  SITE (2274): n equals a,t,g, or c
  SITE (2275): n equals a,t,g, or c
  SITE (2276): n equals a,t,g, or c
  SITE (2277): n equals a,t,g, or c
  SITE (2278): n equals a,t,g, or c
  SITE (2279): n equals a,t,g, or c
  SITE (2280): n equals a,t,g, or c
  SITE (2281): n equals a,t,g, or c
  SITE (2282): n equals a,t,g, or c
  SITE (2283): n equals a,t,g, or c
  SITE (2284): n equals a,t,g, or c
  SITE (2285): n equals a,t,g, or c
  SITE (2286): n equals a,t,g, or c
  SITE (2287): n equals a,t,g, or c
  SITE (2288): n equals a,t,g, or c
  SITE (2289): n equals a,t,g, or c
  SITE (2290): n equals a,t,g, or c
  SITE (2291): n equals a,t,g, or c
  SITE (2292): n equals a,t,g, or c
  SITE (2293): n equals a,t,g, or c
  SITE (2294): n equals a,t,g, or c
  SITE (2295): n equals a,t,g, or c
  SITE (2296): n equals a,t,g, or c
  SITE (2297): n equals a,t,g, or c
  SITE (2298): n equals a,t,g, or c
  SITE (2299): n equals a,t,g, or c
  SITE (2300): n equals a,t,g, or c
  SITE (2301): n equals a,t,g, or c
  SITE (2302): n equals a,t,g, or c
  SITE (2303): n equals a,t,g, or c
  SITE (2304): n equals a,t,g, or c
  SITE (2305): n equals a,t,g, or c
  SITE (2306): n equals a,t,g, or c
  SITE (2307): n equals a,t,g, or c
  SITE (2308): n equals a,t,g, or c
  SITE (2309): n equals a,t,g, or c
  SITE (2310): n equals a,t,g, or c
  SITE (2311): n equals a,t,g, or c
  SITE (2312): n equals a,t,g, or c
  SITE (2313): n equals a,t,g, or c
  SITE (2314): n equals a,t,g, or c
  SITE (2315): n equals a,t,g, or c
  SITE (2316): n equals a,t,g, or c
  SITE (2317): n equals a,t,g, or c
  SITE (2318): n equals a,t,g, or c
  SITE (2319): n equals a,t,g, or c
  SITE (2320): n equals a,t,g, or c
  SITE (2321): n equals a,t,g, or c
  SITE (2322): n equals a,t,g, or c
  SITE (2323): n equals a,t,g, or c
  SITE (2324): n equals a,t,g, or c
  SITE (2325): n equals a,t,g, or c
  SITE (2326): n equals a,t,g, or c
  SITE (2327): n equals a,t,g, or c
  SITE (2328): n equals a,t,g, or c
  SITE (2329): n equals a,t,g, or c
  SITE (2330): n equals a,t,g, or c
  SITE (2331): n equals a,t,g, or c
  SITE (2332): n equals a,t,g, or c
  SITE (2333): n equals a,t,g, or c
  SITE (2334): n equals a,t,g, or c
  SITE (2335): n equals a,t,g, or c
  SITE (2336): n equals a,t,g, or c
  SITE (2337): n equals a,t,g, or c
  SITE (2338): n equals a,t,g, or c
  SITE (2339): n equals a,t,g, or c
  SITE (2340): n equals a,t,g, or c
  SITE (2341): n equals a,t,g, or c
  SITE (2342): n equals a,t,g, or c
  SITE (2343): n equals a,t,g, or c
  SITE (2344): n equals a,t,g, or c
  SITE (2345): n equals a,t,g, or c
  SITE (2346): n equals a,t,g, or c
  SITE (2347): n equals a,t,g, or c
  SITE (2348): n equals a,t,g, or c
  SITE (2349): n equals a,t,g, or c
  SITE (2350): n equals a,t,g, or c
  SITE (2351): n equals a,t,g, or c
  SITE (2352): n equals a,t,g, or c
  SITE (2353): n equals a,t,g, or c
  SITE (2354): n equals a,t,g, or c
  SITE (2355): n equals a,t,g, or c
  SITE (2356): n equals a,t,g, or c
  SITE (2357): n equals a,t,g, or c
  SITE (2358): n equals a,t,g, or c
  SITE (2359): n equals a,t,g, or c
  SITE (2360): n equals a,t,g, or c
  SITE (2361): n equals a,t,g, or c
  SITE (2362): n equals a,t,g, or c
  SITE (2363): n equals a,t,g, or c
  SITE (2364): n equals a,t,g, or c
  SITE (2365): n equals a,t,g, or c
  SITE (2366): n equals a,t,g, or c
  SITE (2367): n equals a,t,g, or c
  SITE (2368): n equals a,t,g, or c
  SITE (2369): n equals a,t,g, or c
  SITE (2370): n equals a,t,g, or c
  SITE (2371): n equals a,t,g, or c
  SITE (2372): n equals a,t,g, or c
  SITE (2373): n equals a,t,g, or c
  SITE (2374): n equals a,t,g, or c
  SITE (2375): n equals a,t,g, or c
  SITE (2376): n equals a,t,g, or c
  SITE (2377): n equals a,t,g, or c
  SITE (2378): n equals a,t,g, or c
  SITE (2379): n equals a,t,g, or c
  SITE (2380): n equals a,t,g, or c
  SITE (2381): n equals a,t,g, or c
  SITE (2382): n equals a,t,g, or c
  SITE (2383): n equals a,t,g, or c
  SITE (2384): n equals a,t,g, or c
  SITE (2385): n equals a,t,g, or c
  SITE (2386): n equals a,t,g, or c
  SITE (2387): n equals a,t,g, or c
  SITE (2388): n equals a,t,g, or c
  SITE (2389): n equals a,t,g, or c
  SITE (2390): n equals a,t,g, or c
  SITE (2391): n equals a,t,g, or c
  SITE (2392): n equals a,t,g, or c
  SITE (2393): n equals a,t,g, or c
  SITE (2394): n equals a,t,g, or c
  SITE (2395): n equals a,t,g, or c
  SITE (2396): n equals a,t,g, or c
  SITE (2397): n equals a,t,g, or c
  SITE (2398): n equals a,t,g, or c
  SITE (2399): n equals a,t,g, or c
  SITE (2400): n equals a,t,g, or c
  SITE (2401): n equals a,t,g, or c
  SITE (2402): n equals a,t,g, or c
  SITE (2403): n equals a,t,g, or c
  SITE (2404): n equals a,t,g, or c
  SITE (2405): n equals a,t,g, or c
  SITE (2406): n equals a,t,g, or c
  SITE (2407): n equals a,t,g, or c
  SITE (2408): n equals a,t,g, or c
  SITE (2409): n equals a,t,g, or c
  SITE (2410): n equals a,t,g, or c
  SITE (2411): n equals a,t,g, or c
  SITE (2412): n equals a,t,g, or c
  SITE (2413): n equals a,t,g, or c
  SITE (2414): n equals a,t,g, or c
  SITE (2415): n equals a,t,g, or c
  SITE (2416): n equals a,t,g, or c
  SITE (2417): n equals a,t,g, or c
  SITE (2418): n equals a,t,g, or c
  SITE (2419): n equals a,t,g, or c
  SITE (2420): n equals a,t,g, or c
  SITE (2421): n equals a,t,g, or c
  SITE (2422): n equals a,t,g, or c
  SITE (2423): n equals a,t,g, or c
  SITE (2424): n equals a,t,g, or c
  SITE (2425): n equals a,t,g, or c
  SITE (2426): n equals a,t,g, or c
  SITE (2427): n equals a,t,g, or c
  SITE (2428): n equals a,t,g, or c
  SITE (2429): n equals a,t,g, or c
  SITE (2430): n equals a,t,g, or c
  SITE (2431): n equals a,t,g, or c
  SITE (2432): n equals a,t,g, or c
  SITE (2433): n equals a,t,g, or c
  SITE (2434): n equals a,t,g, or c
  SITE (2435): n equals a,t,g, or c
  SITE (2436): n equals a,t,g, or c
  SITE (2437): n equals a,t,g, or c
  SITE (2438): n equals a,t,g, or c
  SITE (2439): n equals a,t,g, or c
  SITE (2440): n equals a,t,g, or c
  SITE (2441): n equals a,t,g, or c
  SITE (2442): n equals a,t,g, or c
  SITE (2443): n equals a,t,g, or c
  SITE (2444): n equals a,t,g, or c
  SITE (2445): n equals a,t,g, or c
  SITE (2446): n equals a,t,g, or c
  SITE (2447): n equals a,t,g, or c
  SITE (2448): n equals a,t,g, or c
  SITE (2449): n equals a,t,g, or c
  SITE (2450): n equals a,t,g, or c
  SITE (2451): n equals a,t,g, or c
  SITE (2452): n equals a,t,g, or c
  SITE (2453): n equals a,t,g, or c
  SITE (2454): n equals a,t,g, or c
  SITE (2455): n equals a,t,g, or c
  SITE (2456): n equals a,t,g, or c
  SITE (2457): n equals a,t,g, or c
  SITE (2458): n equals a,t,g, or c
  SITE (2459): n equals a,t,g, or c
  SITE (2460): n equals a,t,g, or c
  SITE (2461): n equals a,t,g, or c
  SITE (2462): n equals a,t,g, or c
  SITE (2463): n equals a,t,g, or c
  SITE (2464): n equals a,t,g, or c
  SITE (2465): n equals a,t,g, or c
  SITE (2466): n equals a,t,g, or c
  SITE (2467): n equals a,t,g, or c
  SITE (2468): n equals a,t,g, or c
  SITE (2469): n equals a,t,g, or c
  SITE (2470): n equals a,t,g, or c
  SITE (2471): n equals a,t,g, or c
  SITE (2472): n equals a,t,g, or c
  SITE (2473): n equals a,t,g, or c
  SITE (2474): n equals a,t,g, or c
  SITE (2475): n equals a,t,g, or c
  SITE (2476): n equals a,t,g, or c
  SITE (2477): n equals a,t,g, or c
  SITE (2478): n equals a,t,g, or c
  SITE (2479): n equals a,t,g, or c
  SITE (2480): n equals a,t,g, or c
  SITE (2481): n equals a,t,g, or c
  SITE (2482): n equals a,t,g, or c
  SITE (2483): n equals a,t,g, or c
  SITE (2484): n equals a,t,g, or c
  SITE (2485): n equals a,t,g, or c
  SITE (2486): n equals a,t,g, or c
  SITE (2487): n equals a,t,g, or c
  SITE (2488): n equals a,t,g, or c
  SITE (2489): n equals a,t,g, or c
  SITE (2490): n equals a,t,g, or c
  SITE (2491): n equals a,t,g, or c
  SITE (2492): n equals a,t,g, or c
  SITE (2493): n equals a,t,g, or c
  SITE (2494): n equals a,t,g, or c
  SITE (2495): n equals a,t,g, or c
  SITE (2496): n equals a,t,g, or c
  SITE (2497): n equals a,t,g, or c
  SITE (2498): n equals a,t,g, or c
  SITE (2499): n equals a,t,g, or c
  SITE (2500): n equals a,t,g, or c
  SITE (2501): n equals a,t,g, or c
  SITE (2502): n equals a,t,g, or c
  SITE (2503): n equals a,t,g, or c
  SITE (2504): n equals a,t,g, or c
  SITE (2505): n equals a,t,g, or c
  SITE (2506): n equals a,t,g, or c
  SITE (2507): n equals a,t,g, or c
  SITE (2508): n equals a,t,g, or c
  SITE (2509): n equals a,t,g, or c
  SITE (2510): n equals a,t,g, or c
  SITE (2511): n equals a,t,g, or c
  SITE (2512): n equals a,t,g, or c
  SITE (2513): n equals a,t,g, or c
  SITE (2514): n equals a,t,g, or c
  SITE (2515): n equals a,t,g, or c
  SITE (2516): n equals a,t,g, or c
  SITE (2517): n equals a,t,g, or c
  SITE (2518): n equals a,t,g, or c
  SITE (2519): n equals a,t,g, or c
  SITE (2520): n equals a,t,g, or c
  SITE (2521): n equals a,t,g, or c
  SITE (2522): n equals a,t,g, or c
  SITE (2523): n equals a,t,g, or c
  SITE (2524): n equals a,t,g, or c
  SITE (2525): n equals a,t,g, or c
  SITE (2526): n equals a,t,g, or c
  SITE (2527): n equals a,t,g, or c
  SITE (2528): n equals a,t,g, or c
  SITE (2529): n equals a,t,g, or c
  SITE (2530): n equals a,t,g, or c
  SITE (2531): n equals a,t,g, or c
  SITE (2532): n equals a,t,g, or c
  SITE (2533): n equals a,t,g, or c
  SITE (2534): n equals a,t,g, or c
  SITE (2535): n equals a,t,g, or c
  SITE (2536): n equals a,t,g, or c
  SITE (2537): n equals a,t,g, or c
  SITE (2538): n equals a,t,g, or c
  SITE (2539): n equals a,t,g, or c
  SITE (2540): n equals a,t,g, or c
  SITE (2541): n equals a,t,g, or c
  SITE (2542): n equals a,t,g, or c
  SITE (2543): n equals a,t,g, or c
  SITE (2544): n equals a,t,g, or c
  SITE (2545): n equals a,t,g, or c
  SITE (2546): n equals a,t,g, or c
  SITE (2547): n equals a,t,g, or c
  SITE (2548): n equals a,t,g, or c
  SITE (2549): n equals a,t,g, or c
  SITE (2550): n equals a,t,g, or c
  SITE (2551): n equals a,t,g, or c
  SITE (2552): n equals a,t,g, or c
  SITE (2553): n equals a,t,g, or c
  SITE (2554): n equals a,t,g, or c
  SITE (2555): n equals a,t,g, or c
  SITE (2556): n equals a,t,g, or c
  SITE (2557): n equals a,t,g, or c
  SITE (2558): n equals a,t,g, or c
  SITE (2559): n equals a,t,g, or c
  SITE (2560): n equals a,t,g, or c
  SITE (2561): n equals a,t,g, or c
  SITE (2562): n equals a,t,g, or c
  SITE (2563): n equals a,t,g, or c
  SITE (2564): n equals a,t,g, or c
  SITE (2565): n equals a,t,g, or c
  SITE (2566): n equals a,t,g, or c
  SITE (2567): n equals a,t,g, or c
  SITE (2568): n equals a,t,g, or c
  SITE (2569): n equals a,t,g, or c
  SITE (2570): n equals a,t,g, or c
  SITE (2571): n equals a,t,g, or c
  SITE (2572): n equals a,t,g, or c
  SITE (2573): n equals a,t,g, or c
  SITE (2574): n equals a,t,g, or c
  SITE (2575): n equals a,t,g, or c
  SITE (2576): n equals a,t,g, or c
  SITE (2577): n equals a,t,g, or c
  SITE (2578): n equals a,t,g, or c
  SITE (2579): n equals a,t,g, or c
  SITE (2580): n equals a,t,g, or c
  SITE (2581): n equals a,t,g, or c
  SITE (2582): n equals a,t,g, or c
  SITE (2583): n equals a,t,g, or c
  SITE (2584): n equals a,t,g, or c
  SITE (2585): n equals a,t,g, or c
  SITE (2586): n equals a,t,g, or c
  SITE (2587): n equals a,t,g, or c
  SITE (2588): n equals a,t,g, or c
  SITE (2589): n equals a,t,g, or c
  SITE (2590): n equals a,t,g, or c
  SITE (2591): n equals a,t,g, or c
  SITE (2592): n equals a,t,g, or c
  SITE (2593): n equals a,t,g, or c
  SITE (2594): n equals a,t,g, or c
  SITE (2595): n equals a,t,g, or c
  SITE (2596): n equals a,t,g, or c
  SITE (2597): n equals a,t,g, or c
  SITE (2598): n equals a,t,g, or c
  SITE (2599): n equals a,t,g, or c
  SITE (2600): n equals a,t,g, or c
  SITE (2601): n equals a,t,g, or c
  SITE (2602): n equals a,t,g, or c
  SITE (2603): n equals a,t,g, or c
  SITE (2604): n equals a,t,g, or c
  SITE (2605): n equals a,t,g, or c
  SITE (2606): n equals a,t,g, or c
  SITE (2607): n equals a,t,g, or c
  SITE (2608): n equals a,t,g, or c
  SITE (2609): n equals a,t,g, or c
  SITE (2610): n equals a,t,g, or c
  SITE (2611): n equals a,t,g, or c
  SITE (2612): n equals a,t,g, or c
  SITE (2613): n equals a,t,g, or c
  SITE (2614): n equals a,t,g, or c
  SITE (2615): n equals a,t,g, or c
  SITE (2616): n equals a,t,g, or c
  SITE (2617): n equals a,t,g, or c
  SITE (2618): n equals a,t,g, or c
  SITE (2619): n equals a,t,g, or c
  SITE (2620): n equals a,t,g, or c
  SITE (2621): n equals a,t,g, or c
  SITE (2622): n equals a,t,g, or c
  SITE (2623): n equals a,t,g, or c
  SITE (2624): n equals a,t,g, or c
  SITE (2625): n equals a,t,g, or c
  SITE (2626): n equals a,t,g, or c
  SITE (2627): n equals a,t,g, or c
  SITE (2628): n equals a,t,g, or c
  SITE (2629): n equals a,t,g, or c
  SITE (2630): n equals a,t,g, or c
  SITE (2631): n equals a,t,g, or c
  SITE (2632): n equals a,t,g, or c
  SITE (2633): n equals a,t,g, or c
  SITE (2634): n equals a,t,g, or c
  SITE (2635): n equals a,t,g, or c
  SITE (2636): n equals a,t,g, or c
  SITE (2637): n equals a,t,g, or c
  SITE (2638): n equals a,t,g, or c
  SITE (2639): n equals a,t,g, or c
  SITE (2640): n equals a,t,g, or c
  SITE (2641): n equals a,t,g, or c
  SITE (2642): n equals a,t,g, or c
  SITE (2643): n equals a,t,g, or c
  SITE (2644): n equals a,t,g, or c
  SITE (2645): n equals a,t,g, or c
  SITE (2646): n equals a,t,g, or c
  SITE (2647): n equals a,t,g, or c
  SITE (2648): n equals a,t,g, or c
  SITE (2649): n equals a,t,g, or c
  SITE (2650): n equals a,t,g, or c
  SITE (2651): n equals a,t,g, or c
  SITE (2652): n equals a,t,g, or c
  SITE (2653): n equals a,t,g, or c
  SITE (2654): n equals a,t,g, or c
  SITE (2655): n equals a,t,g, or c
  SITE (2656): n equals a,t,g, or c
  SITE (2657): n equals a,t,g, or c
  SITE (2658): n equals a,t,g, or c
  SITE (2659): n equals a,t,g, or c
  SITE (2660): n equals a,t,g, or c
  SITE (2661): n equals a,t,g, or c
  SITE (2662): n equals a,t,g, or c
  SITE (2663): n equals a,t,g, or c
  SITE (2664): n equals a,t,g, or c
  SITE (2665): n equals a,t,g, or c
  SITE (2666): n equals a,t,g, or c
  SITE (2667): n equals a,t,g, or c
  SITE (2668): n equals a,t,g, or c
  SITE (2669): n equals a,t,g, or c
  SITE (2670): n equals a,t,g, or c
  SITE (2671): n equals a,t,g, or c
  SITE (2672): n equals a,t,g, or c
  SITE (2673): n equals a,t,g, or c
  SITE (2674): n equals a,t,g, or c
  SITE (2675): n equals a,t,g, or c
  SITE (2676): n equals a,t,g, or c
  SITE (2677): n equals a,t,g, or c
  SITE (2678): n equals a,t,g, or c
  SITE (2679): n equals a,t,g, or c
  SITE (2680): n equals a,t,g, or c
  SITE (2681): n equals a,t,g, or c
  SITE (2682): n equals a,t,g, or c
  SITE (2683): n equals a,t,g, or c
  SITE (2684): n equals a,t,g, or c
  SITE (2685): n equals a,t,g, or c
  SITE (2686): n equals a,t,g, or c
  SITE (2687): n equals a,t,g, or c
  SITE (2688): n equals a,t,g, or c
  SITE (2689): n equals a,t,g, or c
  SITE (2690): n equals a,t,g, or c
  SITE (2691): n equals a,t,g, or c
  SITE (2692): n equals a,t,g, or c
  SITE (2693): n equals a,t,g, or c
  SITE (2694): n equals a,t,g, or c
  SITE (2695): n equals a,t,g, or c
  SITE (2696): n equals a,t,g, or c
  SITE (2697): n equals a,t,g, or c
  SITE (2698): n equals a,t,g, or c
  SITE (2699): n equals a,t,g, or c
  SITE (2700): n equals a,t,g, or c
  SITE (2701): n equals a,t,g, or c
  SITE (2702): n equals a,t,g, or c
  SITE (2703): n equals a,t,g, or c
  SITE (2704): n equals a,t,g, or c
  SITE (2705): n equals a,t,g, or c
  SITE (2706): n equals a,t,g, or c
  SITE (2707): n equals a,t,g, or c
  SITE (2708): n equals a,t,g, or c
  SITE (2709): n equals a,t,g, or c
  SITE (2710): n equals a,t,g, or c
  SITE (2711): n equals a,t,g, or c
  SITE (2712): n equals a,t,g, or c
  SITE (2713): n equals a,t,g, or c
  SITE (2714): n equals a,t,g, or c
  SITE (2715): n equals a,t,g, or c
  SITE (2716): n equals a,t,g, or c
  SITE (2717): n equals a,t,g, or c
  SITE (2718): n equals a,t,g, or c
  SITE (2719): n equals a,t,g, or c
  SITE (2720): n equals a,t,g, or c
  SITE (2721): n equals a,t,g, or c
  SITE (2722): n equals a,t,g, or c
  SITE (2723): n equals a,t,g, or c
  SITE (2724): n equals a,t,g, or c
  SITE (2725): n equals a,t,g, or c
  SITE (2726): n equals a,t,g, or c
  SITE (2727): n equals a,t,g, or c
  SITE (2728): n equals a,t,g, or c
  SITE (2729): n equals a,t,g, or c
  SITE (2730): n equals a,t,g, or c
  SITE (2731): n equals a,t,g, or c
  SITE (2732): n equals a,t,g, or c
  SITE (2733): n equals a,t,g, or c
  SITE (2734): n equals a,t,g, or c
  SITE (2735): n equals a,t,g, or c
  SITE (2736): n equals a,t,g, or c
  SITE (2737): n equals a,t,g, or c
  SITE (2738): n equals a,t,g, or c
  SITE (2739): n equals a,t,g, or c
  SITE (2740): n equals a,t,g, or c
  SITE (2741): n equals a,t,g, or c
  SITE (2742): n equals a,t,g, or c
  SITE (2743): n equals a,t,g, or c
  SITE (2744): n equals a,t,g, or c
  SITE (2745): n equals a,t,g, or c
  SITE (2746): n equals a,t,g, or c
  SITE (2747): n equals a,t,g, or c
  SITE (2748): n equals a,t,g, or c
  SITE (2749): n equals a,t,g, or c
  SITE (2750): n equals a,t,g, or c
  SITE (2751): n equals a,t,g, or c
  SITE (2752): n equals a,t,g, or c
  SITE (2753): n equals a,t,g, or c
  SITE (2754): n equals a,t,g, or c
  SITE (2755): n equals a,t,g, or c
  SITE (2756): n equals a,t,g, or c
  SITE (2757): n equals a,t,g, or c
  SITE (2758): n equals a,t,g, or c
  SITE (2759): n equals a,t,g, or c
  SITE (2760): n equals a,t,g, or c
  SITE (2761): n equals a,t,g, or c
  SITE (2762): n equals a,t,g, or c
  SITE (2763): n equals a,t,g, or c
  SITE (2764): n equals a,t,g, or c
  SITE (2765): n equals a,t,g, or c
  SITE (2766): n equals a,t,g, or c
  SITE (2767): n equals a,t,g, or c
  SITE (2768): n equals a,t,g, or c
  SITE (2769): n equals a,t,g, or c
  SITE (2770): n equals a,t,g, or c
  SITE (2771): n equals a,t,g, or c
  SITE (2772): n equals a,t,g, or c
  SITE (2773): n equals a,t,g, or c
  SITE (2774): n equals a,t,g, or c
  SITE (2775): n equals a,t,g, or c
  SITE (2776): n equals a,t,g, or c
  SITE (2777): n equals a,t,g, or c
  SITE (2778): n equals a,t,g, or c
  SITE (2779): n equals a,t,g, or c
  SITE (2780): n equals a,t,g, or c
  SITE (2781): n equals a,t,g, or c
  SITE (2782): n equals a,t,g, or c
  SITE (2783): n equals a,t,g, or c
  SITE (2784): n equals a,t,g, or c
  SITE (2785): n equals a,t,g, or c
  SITE (2786): n equals a,t,g, or c
  SITE (2787): n equals a,t,g, or c
  SITE (2788): n equals a,t,g, or c
  SITE (2789): n equals a,t,g, or c
  SITE (2790): n equals a,t,g, or c
  SITE (2791): n equals a,t,g, or c
  SITE (2792): n equals a,t,g, or c
  SITE (2793): n equals a,t,g, or c
  SITE (2794): n equals a,t,g, or c
  SITE (2795): n equals a,t,g, or c
  SITE (2796): n equals a,t,g, or c
  SITE (2797): n equals a,t,g, or c
  SITE (2798): n equals a,t,g, or c
  SITE (2799): n equals a,t,g, or c
  SITE (2800): n equals a,t,g, or c
  SITE (2801): n equals a,t,g, or c
  SITE (2802): n equals a,t,g, or c
  SITE (2803): n equals a,t,g, or c
  SITE (2804): n equals a,t,g, or c
  SITE (2805): n equals a,t,g, or c
  SITE (2806): n equals a,t,g, or c
  SITE (2807): n equals a,t,g, or c
  SITE (2808): n equals a,t,g, or c
  SITE (2809): n equals a,t,g, or c
  SITE (2810): n equals a,t,g, or c
  SITE (2811): n equals a,t,g, or c
  SITE (2812): n equals a,t,g, or c
  SITE (2813): n equals a,t,g, or c
  SITE (2814): n equals a,t,g, or c
  SITE (2815): n equals a,t,g, or c
  SITE (2816): n equals a,t,g, or c
  SITE (2817): n equals a,t,g, or c
  SITE (2818): n equals a,t,g, or c
  SITE (2819): n equals a,t,g, or c
tcatatggactctttttctcctccccttcttttccaatgtcatgcagtctcttaacactgggtttcaaccactatacagaaaaatgttagtgaaaaaggaagaggggttccatgctgcttgattctccctaaccaggcacactaaactaggggtgacagtgtatcacaaagtccagactcacagtcttgctgccccttctcctcttcaaagtttgtttccgaagtaccaccccttgcacctcacatcccagccaactctgcctacctgtcagccccagccctcctcaggcctgcctcagcctcacagccaggatcctaccaacaccaacaccgcgccaaataacccctcccaaaagcctcaccggaactaatctggggactctgcctattattaggaacaccttggatgaagcccctacccgcagaattctggcagtagcagcagaattttcaggcatgtgcctaattttgttggggtggtggttgattattttttttaaatctaggatttctgggatctgaagcttatacaatcttggatatcttctttaagaaaaagaatacaaaaatatcttctataagttttacaaaaatatatgaccatgtgagcacgttgctagctcccgcccccaccccaccccccagagccttggaaggggagtgaaactgaagcttttttagcttcatggcaaatatgcttcttcctgagagtactgggtacattcacagacctttattttttactttctatagatttaatttagttaagtcagttcgaagcgggcaaaggccaaaatttctcacccctaggtggctcaaatttctgagcctgagattttatatcttaaaatccattaaaagaatactcaattttcggccgggcgcagtggctcacacctataatcccagcactttgggaggctgaggcgggcagatcacgaggtcaggagatcgagactatcctggctaacacggtgaaaccccgtctccactaaaaatacaaaaaattagccaggcgtggtggcgggcacctgtagtcccagctacccaggaggctgaggcaggagaatggcgtgaacccgggaggcggagcttgcagtgagccgagatcgcgccactgcactctagcctgggcgacagccgtctcaaaaaaagaatactcaatttttaagaagttaggtgtaggtatgcttatataaaatatttagacatgcataagtattttaagtggcctgaaggaagtacatgtatgctacttttgcaaatattttcgctttttttttttttttttttgnnnnnnnnnnnnnnnnnnnnnnnnnnnnnnnnnnnnnnnnnnnnnnnnnnnnnnnnnnnnnnnnnnnnnnnnnnnnnnnnnnnnnnnnnnnnnnnnnnnnnnnnnnnnnnnnnnnnnnnnnnnnnnnnnnnnnnnnnnnnnnnnnnnnnnnnnnnnnnnnnnnnnnnnnnnnnnnnnnnnnnnnnnnnnnnnnnnnnnnnnnnnnnnnnnnnnnnnnnnnnnnnnnnnnnnnnnnnnnnnnnnnnnnnnnnnnnnnnnnnnnnnnnnnnnnnnnnnnnnnnnnnnnnnnnnnnnnnnnnnnnnnnnnnnnnnnnnnnnnnnnnnnnnnnnnnnnnnnnnnnnnnnnnnnnnnnnnnnnnnnnnnnnnnnnnnnnnnnnnnnnnnnnnnnnnnnnnnnnnnnnnnnnnnnnnnnnnnnnnnnnnnnnnnnnnnnnnnnnnnnnnnnnnnnnnnnnnnnnnnnnnnnnnnnnnnnnnnnnnnnnnnnnnnnnnnnnnnnnnnnnnnnnnnnnnnnnnnnnnnnnnnnnnnnnnnnnnnnnnnnnnnnnnnnnnnnnnnnnnnnnnnnnnnnnnnnnnnnnnnnnnnnnnnnnnnnnnnnnnnnnnnnnnnnnnnnnnnnnnnnnnnnnnnnnnnnnnnnnnnnnnnnnnnnnnnnnnnnnnnnnnnnnnnnnnnnnnnnnnnnnnnnnnnnnnnnnnnnnnnnnnnnnnnnnnnnnnnnnnnnnnnnnnnnnnnnnnnnnnnnnnnnnnnnnnnnnnnnnnnnnnnnnnnnnnnnnnnnnnnnnnnnnnnnnnnnnnnnnnnnnnnnnnnnnnnnnnnnnnnnnnnnnnnnnnnnnnnnnnnnnnnnnnnnnnnnnnnnnnnnnnnnnnnnnnnnnnnnnnnnnnnnnnnnnnnnnnnnnnnnnnnnnnnnnnnnnnnnnnnnnnnnnnnnnnnnnnnnnnnnnnnnnnnnnnnnnnnnnnnnnnnnnnnnnnnnnnnnnnnnnnnnnnnnnnnnnnnnnnnnnnnnnnnnnnnnnnnnnnnnnnnnnnnnnnnnnnnnnnnnnnnnnnnnnnnnnnnnnnnnnnnnnnnnnnnnnnnnnnnnnnnnnnnnnnnnnnnnnnnnnnnnnnnnnnnnnnnnnnnnnnnnnnnnnnnnnnnnnnnnnnnnnnnnnnnnnnnnnnnnnnnnnnnnnnnnnnnnnnnnnnnnnnnnnnnnnnnnnnnnnnnnnnnnnnnnnnnnnnnnnnnnnnnnnnnnnnnnnnnnnnnnnnnnnnnnnnnnnnnnnnnnnnnnnnnnnnnnnnnnnnnnnnnnnnnnnnnnnnnnnnnnnnnnnnnnnnnnnnnnnnnnnnnnnnnnnnnnnnnnnnnnnnnnnnnnnnnnnnnnnnnnnnnnnnnnnnnnnnnnnnnnnnnnnnnnnnnnnnnnnnnnnnnnnnnnnnnnnnnnnnnnnnnnnnnnnnnnnnnnnnnnnnnnnnnnnnnnnnnnnnnnnnnnnnnnnnnnnnnnnnnnnnnnnnnnnnnnnnnnnnnnnnnnnnnnnnnnnnnnnnnntcacgcctataatcccagcactttgggagtctgaggcgggcggatcaccagaggtcaggagttcaagaccagcctgaccaacatggtgaaaccccatctctactaaaaatacaaaaattagccaggcatggtggcacacgcctgtagtcccagctacttgggaggctgaggcaggagaattgcttgaacctgagaggcagaggtttcagtgagccaagactgcactactgcactccagcctgaggaacagagcgagactctgtctcaaaaaaaaaaaaaaaaaaaaagaatgtaagtaatttgcccaagctgcagagctaaattttaaactagataattctgattccaaagcccagataatctggctagaagttgcaccaggggattcactgatttacaaagaattagaatgtgataaaattccctgagtacaggcaagtgtgatttttatctttgctagtaaagccatttagatgtcttaaagtgcctcaatctgttgcacctgttctactaaaacaaagaaatgagtcaacggcctcttttagctttaacattctctctgtctatacatttttatagaataatttttagttattgcagcaggtttcaccagtcagccaacgggtgtgtataacattaatcactagcactacacctcagaagtcttgcttattaagagcactcagcttaagtgaagaaattaaagaattttggtaggcctttgggacagttcaagtttaggttgtttggctgggttgagagagtaaaaaactaacatttcttaacctaaccctttttctttctttctcacaggtaacaactatccaatagcttacctttaaaatgtcccctctattgttcctccctcagacatttttgatcacttgtcccagtttccatgagtcctgtatcacagctgtcacaatgcttgagctatttaggtggaggtaactttcagaaatgaactgctgaagggtgcagagtgctcaagaattagattaacaaagaaagtacacctaaatttagcattaaaatgaacttttaaaatatttttcaataggaggataagcaaacataaaaatgggtgtgcttatgtctataaacaggtgctggagcatagattgttatctggacatcaaagaataatagagctgtagctttaaaagagcacacagctggttattagtgattcactcccaggtcactgccaagtgccaaggcatgtggcaagaatagtagaatggaaatcaggtgatgtggattctaatttgagctctgctctgttaaccttgggcatgccagttatcccctttggaccttagtctcttatctacctaatgaagggtttggagcaggtaattcttcagttctaagtaagaatctgtattcatgaataactgttcagcatatgactcagcccaaggtgtacaggattgctggagtgtggaaggtatgttggctcctgcctgtactagcaacaaggcttaatctagtgaacagaaaggatcaaaggtggctatatccccacctaaatgtccatgatctacaagtgctcttctagctggcagagtgggtcagtaatgagattttgtatctcattatatgaagttctaagcactgaacctaatcagttacccatcacttaagtagacagtgtcaggcagagcttaactctccttcctattttcctttgtcttccttttctctgtaagttctctaacataaggaacttccattttggtgaaagaatagaaaagttgagggacaggccaggtgtgttgtaagtaagactgatccagctgattggtttgccatttagattgcatggcagacatctgccataagcacttaaaacacaccttcaataggcattagaaagcacacacacggccaaacatagtagctcacacctgtaatgccaatactttgtgaggctgaggcaggaggattgcttgagcccagcagttcaagaccagcctgggcaatatagcaagatgccatctctacaaaaaattttaaaattatctgaatgtggtagtacattcctgtggtctcagctactcaggggtctgaggtcggaagatcacttgagcccaggagatcaaggctgcagtgagccatgactgtgccattgcactccagcctttgcgacagagcaagaccctgcctcaaaacacacacactgactagggatggtggcttatgcccagcactttaggaggctgaggcaggcagatcacttgaggtcaggagtttaagaccagcctggccaacatggtgaaaccctactctactaaaaatacaaaaatcagccatgcggccaggtgcagtggctctcgcctgtaatcccagcactttgggaagctaaggcaggaggatcacctgaggtcaggagttcgagaccagcctgaccaacatggtgaaatcctgtctctactaaaaatacaaaattagccccgtgtggtggcgcctgcctgtaatcccagctacttgggaggctgaggcaggagaatcacttgaacccaggaggcagaggttacggtgagccgagatcacgccattgcactccagcctgggcaacaagagcgaaactccatctcaaaaaaaaaaaaagaaaagaaaatcagccatgcatggtgacacacagttgtaatcccatctacctgggaggctgaggcaggagaatcgcttgaacctgggaggcagaggttgcagtaagccaagattgcaccactgcactccagcctgggcaacagagtgagactgtgtcttgaaacacacacacacacacacacacacacacacacacacacacacacacacataatttgctgttgttttgggggcatggcggcacatacctatagtcctagctacttgggaggctcaggcaggaggatcacttgaacccaggaagttgaaactgcagtgagctgtgattgtgccgctgcactccagcctgggcaacagagtgaagtactgtctcaagaaaataaaaaaataaagaaataaaaacataaggtttagatggcaactttaaaatgtgaaaggaggatatacagtttttcaaaattcttctaggagctatgccagcaaaaaggtttgaagacctgaagaccattatatcagtggcataaacatctttaatttgtccttttccttctcctacacctagtcaattgattttttttttcccatttatcaatttcagactctgcctggtttttcactttcccatccattttgttacaatatttttcctcccttgaaattagcccagtctcttggagtgaatgccccatgctccttcctaccgctgtgtctttactacattatcctcccttggaatgccgtcatctcttctctgttcaagaactacttctcccgaccactgtggtcgagattgatttctctttaacctctacaacattggctattccatacagttagcccttagcatagaacatcattgtttgattttgctccttaagaatagaaagcacctcttaaaattctaccatattcccccaatgcctaatgcaatgctaaccacatagtgagtgcttaataaatattgtattgactgcctagagtacagagcacttgttcactcattgttcggccattcagctaatactttttgagaaattttgtgtaccaggaactgtactatgcactggggtacggtagggactaaagtagatgataatccctgctttgaaagactgaaaagtaagatatatggtatgtcaaaaggtaataagtactgagaagaaaaatagaaaaagcaggaaagaagaacaagaagtgtgtgatgggggagggttacagggtggggaggggtagtgttgtatacacttctagataagatagggaagtcctcactgatacttatggtgacattttacaaaggacctgaggtgtaggaaggatttgagcttatctgtgcaaagagccttccaggcaaggaacttaccatgtgaaggcaccaaggctggacctgcttaacattccaggaagggaaagctttggggctggagcagaagggtagaggccagattgagagatgagtcagaggacagtggggcccgggcagagggacagaacctgcgggtgctggcaatcagccttttgatctgagtgagaatagaggccttgagagggctttgagcagaggagtgacctgctgacttaagttgaatagaaccctctagatgcttcattaaggctagactgaagggaggcaaaggcagggtgagatcagtcaggaggcaagtatataatgataatacattgaatataataatgatatattaataataataatccagagatagtggcaactcagaccaggggaagcagtagaggcggagagaagtggtcagattttggatttattttgaaggtagaacagacaggattgctgactctgttgagtagtcagctgggagctattgatggtttctgagcaggagctgaaggaagattaccccggtataggactgctgggaagacgtggtgcaggcagagatcaggtaggaggccattgcaaggatttaagggtgagatccataagggttttaactgcaaatcagcagaggaaaaagggagtggtgatggtcatggtgacagtgatggtgagagagactggaaaggaggaatcaacaggatttcatgactagataacagagaaccaatatgaagaaggaaaacactttttttttttttttgagacggagtctggctctgttgcccaggctggagtacagtgagacgatctcagctcactgcaacctccgcctcctgggttcaagcgattctcctgcctcagcctcctgagtagctgggattacaggcatgcaccaccacgcccggctaatttttgtatttttagtagagatggggtttcaccatgttggtcaggctggtcttgaactcttgacctggtgatccgcctgccttggcctcccaaagtgctgggattacagacgtggagccaccatgccctggcaggaaaacacacttttgaatgttgtgtgacctggagaatggtaacactgttaatttaaaaaaaaaaaaaaagcccagagaaggctgatttagggagaaatttatgccttagttatacagagtttgagatggtaatgaaatatcaaattaaaactgtccagcaaggaagtaggaaatgtggaactgaaaaagaagttagaactaaagatgtggatctgtctttggcataaagattatattaagttacttgagagtagatgagtttccaaagaagcagtgtagcaagaatagtggagggccaagactggatcctgggggtcagcaacatctaggagccagaaaaaatgccttcggtgaaagaaacggaaagatgggtctattcaaattgtagtcagccaacccatgccagaagtaagcacagaaagtaagagtgaacattggccaagcacagtggctgatgcctgtaatcccaacactttgggaggccaaggcgggcagattgcttgagctcaggagttcgagaccagcctgagcaacatggtgaaactccaactctacaagaaattagccggtcctgtgcacacctgtagtcccagctgctagggaggctcaggtgggaggatcacttgaacctagaaagttgaggctgcagtgagctgtgagcatgccactgcactccagcgtgggcaacagcccggtggctcacgcctgtaatcccagcactttgggacgccaaggcaggtcgatcacttgaggtcaggagttcgagactagcctggccaacatggagaaaccccatctctactgaaaatacaaaaattagctgggcatggtggtgcacacctgtaatcccagctactcgggaggctgagacaggagaatcacttgaacctgggaagcggaggttgccgtgagccaagatcatgccactgcacttcagcctggacaacacagagagactctgtcccaaagggaaaaaaaagaaaaagatccaggagatccattcctaggtatatacccaagagaattgaaaacataaaaacatatgttcacacaaaaacttgtacatgggctcatacctgtaattgcagcactctgggaggccaaagcaggaggatcatttgaggccaggagttcaagaccggcctaggcaacatagtgagaccctgtctctacaaaatgcatgaatgtttgtagcagcattcttcataatgttcctaaagtggaaacaacccagttgtttgtcagctgatgaatgggtagattatatgcagagtatccaggctgggcgtagtggctcatgcctgcaatcctagcactttgggaagctgaggtggacagatcatttgagctcaggaattcaagaccagcctgagcaacatagtgagaccttgtctataaaaaatttttaaatgttaaaaaaaagaatgcagagtatccatacaacgggatattattcagccataaacaggaatgaagtactgatacatgctacaacatggatgaaccttgaaaacatgctaagtgaaataagccagacacaaaggtctacacattgcctgacgccatttatatgaaacacctagaataggccaatctatagagacataaagtagatgaatggttgccaggctctgggagttaagagagaatgggaaatgactgccaacatgtatggggtttctacttgaggtgatgaagatattctgaaattagatagatagtggggatggctgcacaaccttttttttttttctttttgagatggagtctcgctctgttgccaggctggagtgcagtggcgcaatctcagctcactgcaatctctgcctcctgggttcaagcaattctcctccctcagcctcctgagtagctgggactacaggcaggcaccaccacgcccagctaattttttgttagtagagacagggtttcaccatgttggccaggatggtcttgatctcctgacctcgtgatctgccctcctccggctcccaaagtgctgggattacaggcataagccaccatgcccggcgacaaccttttgaatatactaaaaaacattacattttacactttgaagggtgaattttatggtaaattatatctcagtagaaaaaaatccaggaaactgtgtatagtcagccctccatatttgtgggttccacattcatggattctaagctaaataataatacaataataaaaatataaataaaaaacaatatgctatatagcagctatttgcattgcatttacattatattaggtattatgagtaatccagagatgatttaaagtgtatgtgaagatgtgcataggttacatgcaatactacaccatattatataagggacttgagcatctgtggtgtctgctgcgagtactagaaccaatccttcatggacaccaagagataactgtattcaaaaccaatgaaaccagtgaaagagaagtttcaaaaagattgaaaacacagcagggcagtcaaggaaaccagggagaaaggaaagactagtggatttgggtattagaagatgaaagattaaaacaaatcattccatatcagcatgcagtccatagactactcctaaaagttcctgagacttctttaaggaatctctttggggtaaaaattattttcatgatactactaagatgtatttgtcttttccctatgttgacacttgcactgatgttgcaaaatggtggtaaaactgctggcgccttagcacaaatcaggacggtgacaccaaactgtaccagtggtcactgcattctttactgccatgcactcacaatcaaaacagagccagtttcacttaagaatcgttgatgaagtggtaaattttttttgttttttttttttgaggcagggtcttacccaggctagagtgcggtgggggcatcacagctcactgccgcctcaacttcctgggctcaggtgatgctacctcagcctcctgagtagctgaggctacaggtgtgcaccaccacacctggctaatttttgtttttgttttgttttgttttgtttttagagatggggtttcactctgtcgcccaggctaaatattgttaattgtatcaaatgtcagtccttgaataaatcttttttttttaactggtatgcaccaccacacccagctaatttttgtatttttagtagagacggggtttcgccatgttggccaggctggtctggaactcctgacctaaagtgatctacccgtcttggcctcccagagtgctgggaggtgtgggccaccatgcctgatcctgagtacatctttttaaacttgtttgaagaaatgggaaatatgcataaaccgcctctgctgcacactggtagagtacggtggttgtcacaaggaaaagcatttgggcgattattcaagttgcatattgatttagcagcttcttttttcaccgaccaccatttttacttgaaagaatgatagacaaactatggttttagacttaggcatctggcagacagtctcttgaaactgtatgaagtgagcctgtcacttcaaggtaaacaaatgacaatatttgtagccagtgataaaatttacactttcaagtaaaaattagaattttggaaaacttgtatccactcccatgagcttgaccacttttcaatatatacagacttttctgctgaaatcaatggtgaaatttaaggaatatgattttttgatatgtattctaatgaaatatgtcagtatttagaagatctgcctaacaacagggaaccagtattttgcagtgatctatgtgtgatgttacaaagtcatgcatggtaaaatatccattcaaagtgcaagagaagccaatgggttttattataacaaaagttcctaactgttaagaaactactacttgtcaagttttgatgtagcgctaaagaatatccaaaattatctgaaaatgcagatactttctctgtctgtgtaaagccagattttctttgtatattttaaccaaactaacatattacaacagattaaatgcagaagcagatttgagaatccagtcatcttctattaagtcagacagaggccataaatttatgaaaatgtaaaacagtggcattcttctcattagatggctttatttctttgattgttttgggaaatatagtggtttacatttaaagtatgttatttatattaatataatgtgtagtagttttactgttaatatttttactgaattaatcatatcttttactttttttttagttttattttcttccttttttttttttttttgatttggagtctcgctctgttgcctagtctggagcacagtggcgtgatctcagctcactacaacccccacctcctgggttcaagcgattctcctgcctcagcctcccaagtagctgggatcacaggcgcctgccaccatgtctggctggtttttgtatttttagtagggtttcaccatgttggccaggatggtctcaaactcctgacctcaagtgatccacccacctcggcctcccaaagcattgggattacaggagtgagccaccacacccagtttttagtcttattttctaacacagtagacattgatatatagttcccacattaacaaaagttgtttggggtgctcaatttatttatttatttatttatttatttatttatttattttattttaattttctttttgaggcggagtctcactgtgtcgcccaggctggagtgcagtggcacaatctcggctcactgcaagctctgcctcccaggttcacaccattctcctgcctcagcctcccgagtagctggggctacaggtgcccgccaccacacccggctaattttttgtatttttagtagagacagggtttcaccatgttaaccaggatggtctcgatctcctgacctcgtgatccgcccgcctcagcctcccgaagtgctgggattacaggcatgagccaccgtgccccgcttatattttttttatttttatttatttatttatttatttttgagacagggtctcaaaaaaaacaactttgttgcccaggctggagtgcagtggcatcatcgtagctcattgtagcttctgtctccccagactcaggtgatcctcctgcctcagcctctcaagtagctgggactacaggcacgcaccacccaccccacccaactattttttttattttttgtagagacagagtcttgctatgttgcccaggctggtctcaaactcctgggttccagtgattctcccgtctcagcctcccaaagcactgggattacaggtgtgagccaccactcccagccaaatttaccagacttaatggaaacagtccatttctgtttcttcagatgaaacctcacaactttaggattaataagtaatctcacaactattgtacaggaaataagaaaacgttcccgctaacaatgcacgttgtgatagatctggtccctgacacaaacagcacttggaactgagtgaagtccagagactgaataatacagttctatccactccctgtgcttgactacaacccctgaagagggcttgtacaaattaaatgtatcccagcagctgcttgaaagaccacagcattggccgggcacggtgactcacgcttgtaatcccagcactttgggaggccgaggcgggcggatcacgaggtcaggagatcgagaccacggtgaaaccctgtctctactaaaaatacaaaaaattagctgggcgtgatggcgggcgcctgtagtcccagctactcggagaggctgaggcaggagaatggcgtgaacccgggaggcggagcttgcagtgagccgagattgcaccactgcactccagcctgggcgacagagactctgtctcaaaaaaaaaaaaaaaaaacacgcattttgaatgtccctagcattagggattataaaggtcccattctagtagaagatcctcaggtttggagtgtactaaaggtcatcatccttcgcctgctaataaatttctgaagtccctgctttaaacaaacaatcaaaaagaaggaacagttacagtgctgccaaacaagttctttttttttttttgagatggagtttcgctcttgttgccaggctggagtgcaatggcgtgatctcggctcaccacaacctccacctcccaggttcaagcaattctgcctcagcctcccgagtagctgggattacaggcatgcactaccacgcccagctaattttgtattttttttagtagagacagggtttctccatgttgaggctagtctcaaactcctgacctcaggtgatccgcctgcctcggcctcccaaagtgctgggattacaggcgtgagccacggcgcccggccaacaagttcttacaaacctctgggttgttacaaacccatctggtgctaataaaggtaaggcatcaaccccaatctccaagctgagaattttatcctcaggactgagcactgcggcctgcattcggatgttagtggggctgtcagaaccgtgtctcatgctgttaaaagtggaagtccttcccactcagacccacggaagccaactctgatgagtgggagggtgagcagaaggggcttcggtcattttttatagattcttcaggtaactctagccaccatattaagcattggctcccacaaaaaagcattaaggctcagaaacatcttgtagggtcacaccctccctaaaaacagcacatccctgaagtggtggctgggcagccaggctccaaagcccgctgagctgagcggcagccaagaacaaggtttggtgtttacatactcaaaatcagcctgggttgtcacagcaactcacctcagcacagttcttccttctccacggcggcttgcttccaggctttgctgttctccgtcaccgtcttaacgttcctgctaacctggcctgctgcattctttttatttttctcccaattcctccgccttcttctcatgtgtttgctagtgtgcaatacctcacctgtttggaactcaacaacgtcccctcctgcaaaacgcacctgaaaacaagaaatagcacacaaggcctctaagtggccagaacagatgttaccaggcctaagtccataaggaaagcacccaagccccttgcttttgtcttaaatctttttttttttacacctttaaaataaggttatggtttctaaggcctgccgtaaattaggagtagggagaggaactattgccaagcaccccaaaagttcaagaggtgactgttgatcccagagtagcaaggaaagggacagacaggctataagaagtggacacaagaactcagaactcaggacagtgtaggccttgttagagtcaggcagacaatttcacatacctcagaacgtcataaagccatcatgactttactctggaatagatacgatccagacacctagaaaatgttaaattagattcaacttaaagaggcagagtaatatgtgtggtgttttttaatttcgagcattccaaatggttaagggttttcatgcttaaagagagaaacttagctacctagaacttatttatgagtgctctagataattatctactgttttatatttttttatttataccccgttactaaaacaaaagtaaaaataaagcaaaagattgaaggcattgacatttagtctatatactttctagttcctggctctagttcttagcaatatttgctgctaacctggtgttctgtctctgccaaatttctgcccatgtgaaatatatgagacttgatcctatttccttgctcattgatctacctgaaagggtcatagatgtctccacctccctagagctagtgatcctatatcccatcatctcagccagctagaaaacgaaccatcacatgccacctcctacccaattacgtgcttcataaacagaatacctggcatatagcaggcatttactaaacacttggtgaatgaatacatgagccagtaatccataagatatctgtagaattaattacagttgagccttgaacagcgcaggtcctatgggatcccaccccttgtacagtcaaaaatcctcataaaacttttttttcttttttttttgagacagaatcttgctcgttgcccaagctggagtgcaatggcgtgatctcagctcactgccacctccgcctcctgggttcaagcaattctcctgcctcagcttcccaagtaggtgggattacaggtgcctgcaccacgcctaactaatttttgtatttttagtagagatggggtttcaccatgttggccaggctcgtctcaaactcctgatctcaggcgacccacccgcctaagcctcccaaagtaggggattacaggtgtgagctgccgcacccggccgacaggtgtaactttttttttttttttttttttttttgagacagagtctcactctgtcaccaggctggagtgcagtggctctctctgctcactgcaatctctgctcactgcaacctctgcctcccaggttcaagcgattcccctgcctcagcctcctgagtagctgggactacaggtgtgtgccaccatgcccagctaattttttgtattttagtagagacggaatttcaccatgttagccaggatggtctcgatttcctgacctcgtgatccacctgcttcagcctcccaaagtgctgagattacaggcatgagccaccacacccggccacatataacttttgactctccaaaaacttaactactaatagaagacttaccaatagcataaacaagttgattaacatatattttgtatgtcatttgtgttatatatgtatttcttaccataaagtaaactatagaaaagaaaatgttattaagagaatcataagcaagaaaaaatatgtttactcttcattcagtggaagtggatcagcataaaggtcttcctcctcatgatcttcaggttgagcaggcaaggaggaggagaaagagaaagggttgccatctcagcagtggcagaggcagagggaagtctaaggggacccttgctgttcaaaattgtgttgatcaagggtcaactatacttgcatgaagctataaatttaagagcctagcctattatgggaacagcaattaaaaaaaaaaacaccagttggccgggcgtggtggctcacgcctgtaatcctagcactttgggaggccaaggcaggtggatcacctgaggtcaggagttcgagaccagcctggccaacatggtgaaataccgtctctactaaaaatacaaaaattcactgggcatggtggcgggcacctgtaatcccagctacttgggaggctgaagcaggagaatcgcttgaacctaggggccggaggttgcagtgagctgccaagatcgtgccattgcactctccagcctgggtaaaaacagctaaactccatctcaaaaaaaaaaaaaaacaccagttgatcctggcaccaggaagatcaaatggcatttgtttgtttgtttgttttgagacagagtctcgctctgttgcccaagctggagtgcaatggcacgatctcagctcactgcaaactctgcctcccaggttcaagtgattctcctgcctcagcctcccgagtagctgggattacaggcacccgccaccacacccagctaattttttatatttttggtagagatggggtttcaccatgttggccagtatggtctcaaactccggatctcaagtgatccacccacctcagcctcccaaagtgccttggtttacaggcgtgagccactgcaccagccagtacagttttttgttttgttttattttggttttttgagacggaatctcgctctgtcgcccaggctggagtgcagtggtgccatctcagctcactgcaagctccgcctcccgtgttcatgccattctcctgcctcagcctccctagtagctgggactataggcgcccgccaccacacccggctaatttttttttttgtatttttagtagagacggggtttcaccgtgttagccaggatagtctcgatctcctgtcctcatgatccgcccgtctcagcctcccatagtgctgggattacaggcatgagccaccgcgcccagccttttttttttttttttttttaatgtatgggggaaaaatgactagaaggacagaaaccaacatataacatgattgtgtgcatttacttatttaacaaataattgagcaatttatttctgtatgatactattctaagcgttttagagttaagcaaactcacagtaaactgtattgcccatgataaaaactgcagttacataatttaaaagcaagaatcgcagcaattcatcaggcacagtgactcacgcctgtaatcccaacactttgggaggccaaggcaggaagattccttgagcccaggaggtcaaggccagcctgggcaacatagtgagaactcatgtccacaaaaattacaaaatagccaggcatggtggcaagcacctgtggtcccagctactcaagaggctgaagttggaggatcacttgagcccaggaggtcaaggctgcagtgagcgatgatcgtgccactgcactccagcctgggtgacagagcaagagaccctgtctcaaaataaataaaaataaaagcaagaattgcagaaagtataaaccatgaccaactcaagagaataatcaatgaaagaataggcagaatgtctttccaaaaagcagttgagagatccccatcctccacatatgcactagtgcagtggggatgttgccaggcatggccgccagacctctagatagaacactgaaggtgagtctgcagtaaagccatggaatgtgctaattttagtttaggaataccaaattttattgaccgtttttaattcaataagcaacccttggccatgtataatcagttcatgacccatcagaagatcctctgtggttcactcatggcctttggactatactctgaatcatggctttagaagacatttttttagtatacttaaatggattttataacttggttgatgcccagattacagactgtgaggagtatctccacataacttgtaactgctatatatgcagtcagcaattccagtatttagcctgatattaatttatatttttcctcataatctgataatacagtgctagcaagatagatcacaaagtgtaaatgagtgtttctggagcatagatgggtacgctcaaatctttgtatcttgttttttaatagagacggggtttcgctatgttgctcaggctggtgtcgaactcctcggctcaagcaatccccttgcctcagcctcccagagtgctgggattatacatgggagccaccatgcctagcttccttgtatcattttttaaaattcaagtaagagaaaatgtctggcaatagttcataagctataaatgaaacctagtcttaggacccagctttatattgcctcaatcaaatattaatatctttagttcaaaatttgtatttacaaaaaacttttggttcttggggataccgttattgccttctctgttgccatccatataatgtatgttgttttttttttctctctccctctgggctgcgtttcatgccagataaacttccaaaccaaactgggatggcaccaggcacaaataacactcttcttatcttttcccccatctaggttacccctttgctttgttttatcggcattaccttttctacaaggagacctacctcatccacctcttccatacctttacaggcctctcaattgcttattttaactttggtgagtaaactaaattagcagtgacaccgcaattagtgggaacctggaaggaacagacttgaacaaaatttccttgagagaatctaataggtagggaagttataatgctcccacttgcaaagagggttgtatgaagaggaacacagcttaacttttcctttttttcttttatgtacattcttctgtcagataaaaacattttgagggtggttacccttgccatacctcatcaacaaagaatcctcagtttctctgtgctgtggatgtaactgaatgaccgagccaagcagtccccacttagattcattcttcacttcagacattcaaaaatacagtaacaagctgggtgtggtagcccggaattcaaggctgcagtgagctatgattgagctactgcactcaagtctggacaacagagcaagtcgcatctctaaaaaaacaaacaaaaaaagaaaagaaataaaataacaccctaataatcttttttattttaataaataatttccatcctctcctccaaaacatgaggttattctgaaaaaaaagatcctgatgccaacattttttctttatatattacgttgtgattggaagtctcaggacggtgggagtgtaaaaaccaggctaaattctctcttcttgcatccaggaaaccagctctaccactccctgctgtgtattgtgcttcagttcctcatccttcgactaatgggccgcaccatcactgccgtcctcactaccttttgcttccagatggtaaacgtctttcccttagcagctcaggctacagctgacagcggttcaggggacaggggtaggcaggggactgtggtatagaaattagcagacctaatttctaacccctctcccagcacttagcagtatgacttcaggtaggtggcttatcacaggcccaagtgttccatccacagattgtaatggtaactctttgcctgcctcaaggaagggccaccagctaaccctttgcatactgtgccattaggctctttggtttaacccactatccaggagcagagtcacttcaaggcaagacagaaaagcaacttagaatgagttaaagaacctaagcctaggccaggcaaagtggctcacacctgtaatcccagcaccttgggaggccaaggcagtcagattgcttgagcccaggagtttgagactaacccgggcaacatggtgaaaccccatctctacaaaaaaaatacaaaaattagccctccagcctgggcaacatggtgaaacaaaaaaaattaaaaattagccgggtggggtggcatgcacctgtggtcccagcatctaaattctcatctcagtttagccctcattttgccaagaagccttgagcaacgctcttcccattacaggttttcagcacctccatttgtaggaatttattaaggcttttaatgatgggatgaggagaaaggaaaaaggaaagagaacattgaatttcagagcaaggagaagaaatagtagtgatgctagaataaatacttctgcctctcctaggcctaccttctggctggatactattacactgccaccggcaactacgatatcaagtggacaatgccacattgtgttctgactttgaagctgattggtgagtgatggtcactgcctgccttccttacatgtaggtccctcccccatctcactaaaaacttcctcggcaccccccctccgccccccgccatacacttctggctgcactcagtctacaggccacatcctcagtgtcctctcccaccaccctacccatccgttctctctctgctcaggtttggctgttgactactttgacggagggaaagatcaggtaagtacccattcatcggcagagaggttcaagacttaatgaaagggaagaaaaaagttgttaacaaaagactgaacccaaattccagagcggagcctctccctcattccccagcctgtgcaatctccctttcagatagcactgagcaaggatcaacaaatctaatttgcccaggatccagctcttgcacaaagtccagagatcaatgccagcaaggcatttgctaaagcagcaacagccagctatgcacacacatacgcatttccacaagaagcaactatttgtcatcccccaaagagaaggctatttgaagaaccccagtcagtggggcacacaggtggggaacactcaaagtggctcttgtggggagattcaaggctatcctgaaccatgcattctcttcttggcatagaattccttgtcctctgagcaacagaaatatgccatacgtggtgttccttccctgctggaagttgctggtttctcctacttctatggggccttcttggtagggccccagttctcaatgaatcactacatgaagctggtgcagggagagctgattgacataccaggaaagataccaaacaggtaattgcccctcttggtccagatgtttgtgtaggtatttcactcactctgaagtgactcttctgaaagctgcattctccagcatgaccctggcatagagacctgagtcatgcaggccctggactgttgtaacaggcactctgtgccaggagtgggccctttttagtttagggttcttccagttatccattctaacactagtacaaacataaaaatccacatttatgccacaggattttgcctgaaccagtcacatttctgcctttaaagcctattttcatgtatatatgaaatatatttatgattgataggtaggtaggcaggttgataggtaggtaggtagatagaggctgggcacagtggtttcacctctataatcccagcactttgggaggccgaggtgggaggatcacttgagcccgtgagttctagaccagcctggcaacatagagagactctgtctctacaaaaaaatacaaaaattatcagacatagtggcatgcatctgtagtccaagctacataggaggctgaagtgggagaattgcttgagtccaggggaggtgggtcaaggctgcagtgagctttgatcacaccactgcactccattctgggcaacatagcaaaatcctgtctcaaaaatatttatcagtaggaaatgcaggagggcacagtggctcatgcctgtaatgccaacgctctgggaggccaaggcaggaggatcactggaggccaggagttcaagaccagcctgggcaacatagtgagaccccatctctacaaaaaaaaattatccaggcaaggtggtacatgcctatagtcccagctactcaggtggccaaggcaaggggatcgcttgagcccaggagttcaaggccacagcgagcaatgactatgcctctgtactctagccggagtggcagagcaaggccctgactctagaaaataaaaattaaaatggtaaaaaaaaaaaaaaaaaaaaagtttaattgccagaagaattccttcactgagaacttgtccatcctgtgtttcagcatcaattcaaccaagaaatgaaggagcagattcaaagtggttatttttattatcttacctccactgggttttcagtcccaatggagattgtgagacctggcaagaccttgagatcagtagcatccctgaggggtaaacacaagactggtccactgtctgctgccctgactttcctacaactcttaagaggtttgcagtccccattcctcatagccagccatagaaatctttccctgaaacaggaaacactttgggcagcagagcttctcatcccattccaggtagacaaccacacccctaaacactcctctccataactgaaggtcagagggtgaagggaatagtctctgctctctgtgaccaggaacttcactcgttcctttccagcatcattcctgctctcaagcgcctgagtctgggccttttctacctagtgggctacacactgctcagcccccacatcacagaagactatctcctcactgaagactatgacgtgagtgtctactaaagcagcagcagcatgactgcaccagagctagaaaatggacaggcaaggatccctacagatagcagagaagtaggaaatatcatctacaagtgcatgttggttttgctctagatctgtgagttgtcaatgccagccgtgctgggacatgttcatcagccagcactgaacaaccttcgcgggcacagggctgtgccaggtgcacatttagcacccgttgccttctctaggagccgctcctagcttgccttatcacatccacgtgacccctcagagcacagcagcttctgattctccatcctattttcttctcttgactgatacatttgggcacttctagggaattcagaaaccaagggaaggggggaagtgctggcttttgctcctgcccagctgaaaggcttgaaaacagttcagtaattctgggcaggtttctctccttaaattaaaatccaatatgggcccctctgtacttaacattccaaatgctcattccaaacactttgccaacgaaggcaaacagtagagaagttaaatacagtgctgcccttgaggctctccaagggaaaggcgaatgaatattctccaggccctctgcttattcctctctgcctattgtgaaggcaatcaggccagactattgagggcatctggcagcaggactcaggcaggtatgaagtagccagccacaagtgtgaaaaggaagagtgctgagagaaactgcctagtcatgtgatatccctaatgcactgtgctttcttccctcaagaaccaccccttctggttccgctgcatgtacatgctgatctggggcaagtttgtgctgtacaaatatgtcacctgttggctggtcacagtaagtagaaaagttgaaacaaggtcctatttagacaagccatgggggccagtatggggagtggcaagagccctaactgagctattccctctcaggaaggagtatgcattttgacgggcctgggcttcaatggctttgaagaaaagggcaaggcaaagtgggatgcctgtgccaacatgaaggtgtggctctttgaaacaaacccccgcttcactggcaccattgcctcattcaacatcaacaccaacgcctgggtggcccggtgagctgctggtggggagcctggaccctggttccttccttccactgtcttcccagattggagggcaggggtgtaccatgtcacccctatgcgtctttcccatctgggcagaaccccctgtcgctcacactgactttgacccccacctatacccccctcccaaaaaaaccattactgtcatatttgaaaaaaaggcaagatataaaagtgcgttaagacctgggtgttactccagctctgccaatggacttatgtcctccactgccctgtttatcaacagctttacttgtttgtccccaccactagagtgtgggcagcttgagtagagtgtctggttcaccactgatctcagcatcagcctcagtcactgctgctgaaccaagtggctcgtgcgcacacggtctccagctccgccttgggtctgctttccatctctaaaagtaatcagtcagcactgcctcctgtaccctctgggggctacacgtgggaacccaccagcactccaatccaatcctcagggtgaggacccagaggcaggtggcgggatgcaaggaccagtcagtttgagggtcgccccacccacccttttctccagctacatcttcaaacgactcaagttccttggaaataaagaactctctcagggtctctcgttgctattcctggccctctggcacggcctgcactcaggatacctggtctgcttccagatggaattcctcattgttattgtggaaagacaggtaggcctccagggtgggggtgaaggggaatataagggacaagatgctgatgagctcctcctccctccccaggctgccaggctcattcaagagagccccaccctgagcaagctggccgccattactgtcctccagcccttctactatttggtgcaacagaccatccactggctcttcatgggttactccatgactgccttctgcctcttcacgtgggacaaatggcttaaggcaagtgaaggcctgcttgtgagactgggagggactcactgcaacctcaaaggttgcaaaggacactccaggcctgtctaccttagtggcctctctctccacaggtgtataaatccatctatttccttggccacatcttcttcctgagcctactattcatattgccttatattcacaaagcaatggtgccaaggaaagagaagttaaagaagatggaataatccatttccctggtaagttaatacagctaaactaaaactaccaccaggttacagaatagagcaacagactggaaaaaaacaatagtattagaaatctggggtgaattccaaggattagcctggctactaaggaacacagtatgggcaatgactactgtgacttattgaggcatgctaggaaacatctggaagggctatagaccaggaattacaggagtaactaaccagccttccaaactcctcttgtcttgcaggtggcctgtgcgggactggtgcagaaactactcgtctcccttttcacagcactcctttgccccagagcagagaatggaaaagccagggaggtggaagatcgatgcttccagctgtgcctctgctgccagccaagtcttcatttggggccaaaggggaaacttttttttggagaaggcgtcttgctttgtcacccacgctggaatgcagtggcgggatctcagctcaccgcaacctccacctcctgggttcaagtgattttcctgcctcagcctcccaagtagctgggaatacaggcacgccaccatgcccagctaatttttgtattttcagtagaaacgggatttcaccacgttggccaggctggtctcgaactcctgaccgcaagtgatccacccgcctccgcctcccaaagtgctgggattacaggcgtgagccaccgtgcccggcccaaaggggaaactcttgtgggaggagcagaggggctcacatctcccctctgattcccccatgcacattgccttatctctccccatctagccaggaatctattgtgtttttcttctgccaatttactatgattgtgtatgtgccgctaccaccaccccccccatgggggggtggagaggggtgcaaggccctgcctgctccactttttctaccttggaactgtattagataaaatcacttctgtttgttcagtttttcaccactagcattcctgactgctctctttcacagttcttctccatcatcagggttctctcctttagcacatgggaatctgggagctaaagcctgccttcaaagcatggaaccaaactgcaaactctgtaacctcctatctgtccctgaagtcccggggaacaaacagttttacaccactggatactttaggaaccccaaaacaaccaggtttgcaagaacagtattcataggataaacaaatagcaaatgtacagccttggcttccccaaactccacagtctcagtgcagaaagatcatcttccagcagtcagctcagaccagggtcaaaggatgtgacatcaacagtttctggtttcagaacaggttctactactgtcaaatgaccccccatacttcctcaaaggctgtggtaagttttgcacaggtgagggcagcagaaagggggtagttactgatggacaccatcttctctgtatactccacactgacctaagaaaagaacagttttgtcagccaactctgtcactcagtagctgtttcagcccttctttagggcaggaaaactatggctgagctagtatttcagctgtgctgttgaatatcaaatccctacaaaggatgaagaaggtcctaactgtgacttccaattatggcagcagccctcaaaggatgtgccctggggcagggtgtggaactgtcatgtgtcttctagctcattgtaagcattgttaaaatgcctactgctctgggaattctatactaagttcagctctaccaagaatttcagggttgagcccagaccttaccttgccatgggcaaaggcccctaccacaaaaacaataggatcactgctgggcaccagctcacgcacatcactgacaaccgggatggaaaaagaagtgccaactttcatacatccaactggaaagtgatctgatactggattcttaattacctaaagtaaaaaagagagaaaagtcagccccagaaacattcccagaaccagccttcaactaacaggtttcaatacctcaccttcaaaagcttctgggggccatcagctgctcgaacactgagcttgtgtaaaagttgaactagaagggggaaaaaagagttcagagctagatggagaccacagtccttctgtccagtcatcgaacaaggaaaaccccatggataagatgagttccctgtgtgctttatatctagactggactcctgaaatgttaggaacaaacagttgccaagcatatggctagctgtacagtgatgggttcagactccctctttcactcagccaggaagctactgcaagaacaggagtggagtttccacaaacatagaaaaataataacagtccttgtcctggtattaatcatgttgttctcccattttctcgcttaaaaatccacatttagttctcccttttcctcttcctcccttcttccctactgacaagttcattctaactttgttctaaggcttcttacccatgaggccacaaaagcggtcaaaggttctgggaattcgggtctggggattcacttcaatcagaacattcttctgtgtatggatataaacctgtagcaagccagctcggttcaggggactatccatcagcatcagcaaactctgagcaaagcagaaaccgagacatggttaaggctgaagagaggcagcactcagctgccaacccttccatacagaggctcaaagggttgtgagcactgtccctggagttacctggtgggtgatatctggccgcgcttccccagggtcccgtccattcttcaacaatatagacttgtgcttgtcacagttgagtagctcatatgtcttccctacctgaagaacagggaacatgacgagagaacagcataagcttctgttacctagccccgtggttcttcaagtgtggtccccaaactaccagcagcagctgcacctggaaacttgttaggcaaattctcaggcccaccctagacctactaaaccaggaacactgggggtggagcccagcaagcccttcgggggattactgtgcagccttatttgcactccccagtgaatggtctgagagggaaacaggaggaagggcacaacctgtgacttcacattatctactaatacactggatttaattaaaaaacctgtggctgttaggcaaggccaatgagacatcctggaactaggcaggagttagtagttagcaaggctgaatgctgtgtttattacaggagcagtaagtaggtactgtgcaaaatatcgagtcaccaccctcagtttgcgtacaccaaacatgcactaagtgaagagctgcaaatctgaacaagaaatgtgaaggccgggcgtggtggctcacgcctgtaatcccagcactttgggaggccgaggcgggcagatcacaaggtcaggagattgagaccatcgtggctaacacggtgaaaccccatctctactaaaaatataaaaaattagccgggcatggtggcaggcgcctgtagtcccagctacttgggaggcagaggcaggagaatggcatgaacccaggaggcggagcttgcagcgccactgcactccagcccgggcaacagagcgagactccatctcaaaaaaaagaaatgtgaaaactaatgatgcaggaggcagtttaatcaaagaaaactctcagaagtaaaaggaagaggggttattcccagttttaagacgggcatgggggcagatgcagtggctcacggctgtaatcccagcactctgggaggccaaggcaggcaaatcacttaaggtcaggagttcaagaccagcctgggcaacatggcgaaaccccatctctactaaaaatacaaaaattagctgggcatggtggcacatgcctgtagtcctagctacttgggaggctaaggtgggaggatggcttgagcccaggagacagagattgcagtgagccaagactgtaccactgcactccagcaagaccctgtctcaaaaaaaagaaaaaagaaagactggcatgagcaaaggtacagatggaatcaagacaaagtagccaggtgtggtggcttatgcctgtgatcccaacactttaggaggccgaggtggaaggatcacttgagcccaggaatttgagaccggcctgggcaacacggtgggaccctgtctcacaaaaaaaaaaaaaaaaattagccaggcgcagtgccatttgctggcagtcccagttactcaggaggatgaggtgggaggactgcttgagccagggaagtagaggctgcagtgaaccatcacaccactgcactctgttgcccaggcaacagagcaagaccctatctcaaaaaagaaacaaaaaagaaaaagtggaaacgaagaaaggaaattttgaggaaaattgggagctgagacactaaagggcagtgattatatatgaagctgctttgtaaaccacagaatcctaatgtatcaagcacaaagccaaaaataattctggagtaagcagggcaggatgggaatgactgacagacactatcctaacaactctctgtacactggaaaagacatcagaagtttgatgttaaagaagtggactacatctgtagcagctaaaagaaataattccaagttgcaatttggagtcccaaggagcattagggtggtcagtaaaaagtctaaaaacaaactgttatatacaaatacaagttttggaaggttaagtttttatgtatcactggaatgtatatgtctagcaacattcttgagatatatggctccaaaaagtctgcgaaaaaagggatgtagattttgaaattgaatagttgaagtaatgtcacagagagcacaaagaacaaatgaccaagaactaagtccatgagacacccttagttatagaagaaaaaaaccttcttgaatgaataatacagtttcaacccattagtaggatataatcatgttttctattcttttaatagattacaggcgcaggcctgtaatcccagctactctggaggctgaggcaggagaatcgattgaacccgggaggcggaggctgcagtgagccaagatcgtgccactgcactccagcctggtagagactgagactccatctcaaaaaaaaaaaaaaaaaaaagtgtatttagaacgaagattaaaatcctggcctgacttctaaaccaatgcgatttcttctgggcctattcaattagttctaacgggtaagagaaaggaggaggaagaacactgcccaaggctttaagatagagaactgctggttctattacatgtggggaaagagatgaatgatagataaaaatgcagatgtaaaagttttaaataataaccaggtctggacagtgtatcataggtggatattagagagaggtgactatggatactaatgaattgaaacacgaagcccttacaaaaagtgtgggcagactaggctacataactacgtttctcatctgcccagtaacttgtcttgggatgtggaatgacgcaaggaacgaaactttcctctgcttagactactataccacagaatcctggtaaaccaattggaagcaaggaggtgagggctagaatatcattcaaaaagagcaaaagaaaatgagtactaccggccgggcacagtggctcacgcctctaatcccaacactttgggaggccgaggcgggcggatcacttgaggtcaggagttcgagaccagcgtggccaacatggtgaaaccccatctgaactaaaaatacaaaaaaattagccgggcgtggtggcacctgcctgtagtcccagctactccagaggctgagtcaggagaactgtttgaaggcgggaggcagaagttgcagtgagccgaggtcgcgcaactgcactccagcctgggcgacagagcgagactccgtctcaaaaaaaaaaaaaaaaagaaagaaaaatgagtactaccatcccaggatgtcaaatcaacgcaaagccaaccaagccaccttccttcaaaagcatctttcacccctctctgctttctacatccactctgggccccttaccctcattccacggagtcccaacctatcgatttactacttctccacttcctgtcccaaactaccttgactgtctccagactggccccttccagcaccacaataagcctacggcctccgatcttgtttcctgcccctagtcggggccgcttgggtggcagagcatcccagtcctgtgcctgctccccaccgcttcgttcacgaggcttgaatccatcactgggcgcggccatcttgcaacaataccggaagttgcgctaacgctcttaaataagaacagcgcggcttctaatcacaaatttccttc

SEQ ID NO: 10136 - DNA, 5775 bp, Homo sapiens
cgggtccgtagtgggctaagggggagggtttcaaagggagcgcacttccgctgccctttctttcgccagccttacgggcccgaaccctcgtgtgaagggtgcagtacctaagccggagcggggtagaggcgggccggcacccccttctgacctccagtgccgccggcctcaagatcagacatggcccagaacttgaaggacttggcgggacggctgcccgccgggccccggggcatgggcacggccctgaagctgttgctgggggccggcgccgtggcctacggtgtgcgcgaatctgtgttcaccggtgagcaacctccgcctgctcgccggacgcttccagtccctcccccaaaccccttgccctgtccccgcgcccctccacgggcctagcatttcctctgagcagcggcctggcctgatcaccacccatctccccacagtggaaggcgggcacagagccatcttcttcaatcggatcggtggagtgcagcaggacactatcctggccgagggccttcacttcaggtaatggcgggcagagcctgctgaccctgacctttcacccttgacgccgacccagcagtggctatagtcggacgtgcaacaggattcaacgctgctcttttcccaccctcctcatccctgcccctaggatagtgggtgctgcgagaacctccagcagcatacaaactgttgttttccagagggacaagagaatctctccttgtctgtggtcgtggagaggagcaggccaaaaaacgcgtggtgaggggaaaccgggcaaggctagtgaaactgcggccttttctttttttttttttggagagggagtcttgctctgtcgcccaggctggagtgcagtggcgcgatctcggctcactgcaacctccgcctcctgatttcaagcgattctcctgcctcagcctcacgagtagctgggattacaggcgcccgccaccacgcccggctaatttttgtattttagtagagacggggtttcactatgtagatcaagctggtctcgaactcctgacctcaaatgatccgcccgcctcggcctcccaaagtgctgggattacaggcgtgagccaccgcgcccggccgaaactgtggcctcttaatacctatccctgtcctctccaggatcccttggttccagtaccccattatctatgacattcgggccagacctcgaaaaatctcctcccctacaggctccaaaggtaggtctgagcacttggtaatcacatggcaggtgggatgatcaaggtagctggcaagaaaccccaggggaatatggtagtgtcaggcctttaggcctctttccacatctgcaagagctgtaacaaaaatacctgcctcctggggtcaaagcagcaaattctgaacacactgtgtttgcgtgctttttactgtctcctccctgacgtgtattcaataagagtattgtttgtccctcgtcttgttcactgcctagatcaaagctttgttttaaagccttttttttctaactgcttgacttactatatctacagttacatccactagtacactctgttctggagaagtttgtccctaagcttgactagttcacctgttctctccttctagaccatacataaaagccgtgcctttgagttccccagacctcttcctcctccccacccacgcacacatatacaccctgggtcaggtagctcacctgtaacctgtaatgtacttctttgtgctatacctagtgcaggtcgcttattcatttactagactgggccctgggaataaaagattcattaaacacaattcttgtcccccaagtccttacaggagacatgattacggtacagcacgaaagcgcccacgttagaggttgcacagagtacagagggggaaagagtagtcagctctgctggtgacggggtttgcagttcaaggcttcacagtgggtgagggtgcatttcagctgtgctgcgtcttgtcttccttgtcagcctgattaactctcctccccccagggtagtgccaggctgtacaccattgcacagggcatacagggaggaacatgaaggagaaaatgcttgggaaagggtgtttggccttgaccagccactgctgacctcaatctcagacctacagatggtgaatatctccctgcgagtgttgtctcgacccaatgctcaggagcttcctagcatgtaccagcgcctagggctggactacgaggaacgagtgttgccgtccattgtcaacgaggtgctcaagagtgtggtggccaagttcaatgcctcacagctgatcacccagcgggcccaggtctgactcccaccaccatctgcgtggtgtcagcctttccttcctaggcccagagtattgggaattaggaaaggcagcttattagaaaagcattgtcaccctagtgccatttccacctaaaagctgtgctaattgccactgtgaaataaggagagccagcattagaactcgatagcactcggtgttaggaagcacagaggaaaatggccaagtcttggcttttcctgcacctcttcgagcagagaggcttatgttacaggtttgcctgacaggaagctaaggcagtgcatgttgtattgagagtgaagggttaggggtcgcaaccttcctttcagctccccagtcccctcaaaccacccctcccttcccctcttcacccctgccctcaggtatccctgttgatccgccgggagctgacagagagggccaaggacttcagcctcatcctggatgatgtggccatcacagagctgagctttagccgagagtacacagctgctgtagaagccaaacaagtgggtgagtcgcaagagccgtggggtgagggcttctgagatgcaggaggaggaaagactccatgggtggggctcctgacccaggacagggtctccctgactctctcccaccacagcccagcaggaggcccagcgggcccaattcttggtagaaaaagcaaagcaggaacagcggcagaaaattgtgcaggccgagggtgaggccgaggctgccaagatgatatccttctgctggagagatctcagcccagcccctagggcacctgagttccccattctccttcatgggcaggctgatgagactaaggcgaatgcgactccgtgctctctggcccttggctccttgttgggggtggggactacagatgagatctgaaatcttagtggtagtacctgagccatgactccccactgtaaggccagatcaatagcattggtggccttgccttcatttctggtgctgcccctagttcctggcagcagcctgcagggaggcccacaggtggggtccacggtagggctgggcacaagccacctgagcgcaaccttggatctgacagcccagaggaggactggagcaagggagtgtggtaaggacagggccagggattgagacctgcccttgcgtgtaccttaaccctcctcaccttggagaagcactgagcaagaaccctggctacatcaaacttcgcaagattcgagcagcccagaatatctccaagacggtgagtgtgtcagcccagcgtctctgatggggctgccttgagaaagtgctttcagttaaggcacattgaggtgagggaattcgaaccttgcttgttccggtttctactcagattggcttctctggccggcgcggtggctcacgcatgtaatccccgcactttgggaggccaaggtgggtggatcacctgaggtcaggagttcgagaccagcctggccaacatggtgaaaccccatctctactaaaaatacaaaagataatgagcccgctgtggtggcgtttagctatattcccagctacgcaggaggctgaggcaggagaatcacttgaacccaggaggcggaagttgcagtgagctgagatcatgccactgcactccagcctgagcaacagagcaagactccgtctcaaaaataaataaataaaaaattggcttctccgatactcctcctgtcaagaatgattcctctgggttccctgaccttttgttctaatcatagctgctgctcagcgctctggatccctaagtgcgagcagaaaccatgtgttactcattgctgcacccctgccctaatctgcatgtgttccatgttaagtagctgctgaattgcaggggtcggaattgaggtctttgcttaatgcaagcatctgtcttatttcctgccctgtagatcgccacatcacagaatcgtatctatctcacagctgacaaccttgtgctgaacctacaggatgaaagtttcaccaggtgagagatgtggccacactgtggggtatcaccaagaacgtgggacctgagtctggttgtttgggctctggagcctgctacagctattcatatggctcagagacattgaaccaaaattagaaaagggggtggttgacagtttctatcttgcatctcataggattgattttatgagatcaaataggattattcacataaaaagcactttaattataaagttttcatctaaccaaaaagtgatgaaagatgatactcagttttcttactcaagagccctcaaactcctctggtgaatggagggatgttaggaaaggagatgagaaatagcagtggccatgagaacatgcctcctcctttcatgagcctgagattcctggctgtcaaccctgtttatcttttctcttgggagcaaaggagggttcaaagctgagtggggcctgaagctgtcaattaacatgtgcatttctcttctctgtttcttgttcatctggcgatctggcaccacaggggaaggtaagctgttgttgcttctgtggggtcctgcaggccaccttctccagtacccgcctcctaccctaccccctttcccacctccccgaagacaaaccctcaatcagggtaggagggtcgtagagggaatggcctagagtgtcctgcctctcacatttatgtcccctaataatgtcattatctatcttttttttcctacagtgacagcctcatcaagggtaagaaatgagcctagtcaccaagaactccacccccagaggaagtggatctgcttctccagtttttgaggagccagccaggggtccagcacagccctaccccgccccagtatcatgcgatggtcccccacaccggttccctgaacccctcttggattaaggaagactgaagactagccccttttctggggaattactttcctcctccctgtgttaactggggctgttggggacagtgcgtgatttctcagtgatttcctacagtgttgttccctccctcaaggctgggaggagataaacaccaacccaggaattctcaataaatttttattacttaacctgaagtcaaggcttcacgtgttcatgaactgggtaactggcagcaagcatgcgcacgttcacatgtgcgctcctgggtctgtctttgtgtgtgccagcagggggcgcaaaagaatctggctggggcggctaaggggaagcaaggcctgggctccgaaacaggacccaagctgggaaggctggccctgagttctcgaggcccagctgtgctcttcacacaccctccatttctcccacatcacccatttttttaaggctggacagccatggctttgctgagccagattaaaaatctgatgaccccaacaggagctgcttccttggcagcagggttccttgtggctgtggggagcctgcctgtgcctgttgaggcacttctgtgcccagaagcccagtggatcgcgtggc

SEQ ID NO: 10137 - DNA, 738 bp, Homo sapiens
ctggagcccggggtcctccgctcaactcaggacgttgaggctgcattgagccaagatcatacctctacactccagcatgggcaaaagagcaagattctgtctcaaaaataaataaataaattttgtttttaattagccaggcatgatggcatgcacctgtagtcccagctattcaggagaccaaggtgggaggatcatttgagcccaggaatttgagactgcagtgaactatgatgatgccactgcattccaacctagatgacagaaggagacctcatctctaaaaataaatatatatattttttccaaccactttttatctataccccaatgtcttacattccataaaacatcatgttttgaattccagtataactttatcgttaaacatgtttctttgcagaagcatgtataagttagggtccacaagattatttgcataagctaatttacaaaaaaaattatataatcactgacatgaaagcatgtctgggcagccatgggagctcatatgaggcgtccagttcagtcgccttttaaaaatgatatttgcattagctgggcatggtagcatgtgtctgtagtcccagctactcaggggactgaagtgagaggatgcaccagagccccagaagtcaaggctgcagtgagccatgatcacatcactgcaccagcctgggcaacaggagtgaggccttgtctcagtcagtcaatcaatcaatcaataatggtatttgg

SEQ ID NO: 10138 - DNA, 17862 bp, Homo sapiens
aggacggcgggaagaggagtgcggaacccgcgggaggtgaggcccgccgagccgggctgcgagccgggctgcgagccgggcggcagcggggtcggaggtcgtgggcggcagcgggcgtgaggggtgaggcagggtcaaggggcgggggcggccgcgggtctccattgcccgagcctgtgggagcaggcgggcctggggctgcagcactcaccccgggagccccgccgcagctcgggtagcgttcaggcacctcgccggggccgggccgcgtgcgttcggagcggggaaggcggtctccggggcccccggtgcgcgcggggaggcgtccgctcaggggaggccgaggtgggcccgcggctgcgcccccggccttcgatgccttcgctcgtccgcctgggaccgcgctggcttcgcatcgaagtgggagaggtctgaacagttattttaatactttgatttggaaagaaaatcctttaggccgggcgcggtggctcacgcctgtaatccgagcactttgggaggccgaggcgggcggatcacgaggtcaggagttcaagaccagcctggccaacatggtgaaaccccgtctctactaaaaatacaaaaattagctgggtgtggtggcacgtgcctgtaatcccagctgcttgggaggctgaggcaggagaattgtttgaaccaggacccgggaggcggaggttgcagtgagccgagatcacattactgcactccagcctgggctacagaaaaagactccatctcagaaagcacacaaaaaaaagaagaaaatgtttgttcatcctgcctttaattccttattacaaggcgtgaatttttattgttttttttgagacagtctggctctgtcatccggggtggagtgcagtggcgtcttcacagctaggcacaacctcgacctcccaggctctcaagtagctgggaccgcaagcgccactacactggccagctatttttctttttttttttttttttcggtagagagtaggtcttgctgtgttgcccaggctggtcttgaactcctgggctcaggcgaccttggccgccttggcctcccacggtgctgggatgacaggcatcagcagtgttgaagcctgtgaggtggggtccctgtggctgactctgccctctcctggggccattggcagtgcaggggtccttgtgtgtggaggaaataaggagatgatcaaagtatgattccacgaatcacacggtttattgtcaaagaagatttgttctcgggttcacagtgctcagaggggaggagaggggaggaggtgaagacacctggcagggaagcagggcctccatggatggggtgcattcacggcagggaggtgagtggcagaacggccagggtccggttgctctgctgggatggagcgggcccctggagagtgagatctggtgagagttcgaggtttgccttggtagcagtggagagcgtgagagcgggagctctctgagaagctgggaccgaggtccagctcccaggccagcagcgtatagcttgcctcaaagcatctgcacaaccttcaagctgatgtctgtttttgcagtccagcagtcagggtcagtaactcacataagggagtgtctgacaaggtttaagtggcattcccaaggttgcggagttcactcaagtcctcacatatgtggtctgataagacatcacactcttgcaggggggtcaggtcaccccaaaacatcagactatgtaagtgctgtgaatcacttcaaagctacacagcaggtcccagggcccaaggcagaggagtgagtccacctcggaaggctcagagcagctccaggcagtaaccacggcatttccagagtctggtgtgtgagcctaacagctctggtgtgaccgtccgtactcacctagcagcacgtgacatcagctctccccctgaagtcattgctcagctcgggtgctgcaggaagacatacaggtctgtcttgggccagccccttgcctgctgtgggctgctccctgtgtgtggccttcaccccggtgtagagagatgggctggtcacacccctgcccctcacagcggcgagaggacagaggcatgtgccgggctgtctgtggagctcccaggccagtgtctgggatgcggcaggtgcttggtgttaaagggaaaatattccaggatatctgtgaaagcacgttaggcagagaccaggctttcattcagaacctttgagagatgtgggaaccaccacactgcggtcttgcagtgggagagaggctgggctcagctctgaacaggccatgggctggtggcggcttacagctccagagctgggcaggggcagaggatggaaggttgctaagaggaacccccaggggcgaaggggatgcaggttcaactgacctgccagatcaggccgcccgggggacagtggaagatgaggcgcctaatcagctgtcaagggtgatgggacacgggaggaggtcgtcgctaaacagactttgagccaggcctgttaaaccaagttctcagcaggatgtgcacagagggcccaggaggagcctcaggagccggactgccgttggccaaccggtgagtctgttatccgtcagtggacactctgcttccaggtgccttggcctcggcccgcgtcctgaaggcgggagacgttgcagccacgtgctggccttcccggtgctcctgccagcgtcccgctgcttgacacagtccaagttttgtatccagacccagcctgggacagcagcctcccgacagcccccaggcccagcctgtctgtgacagtcacgcctgctcagggaaccatccctccgtgcagatctgggctgtgttttgggtggtacctcgggtgtggggtcccctaccaggtgcgaggttcatactccccaggctgcctcctgtcctcagggcttggagagtcccatgttctgaaaatgacctcttttcgagccgggcaaggccgcatctcctttggcagtgtagtgtcttccctggaggtggcattcctttttgatttgccttctgtgcttgggaacctcacttcctcactctggccagctctgccagcagtttggagctggttcagcgccccaccgccctgccttggcctgcgcccggccctccagggtggcttctcgccagttcctgtcaggcctgcctgggcaaccaggcctgggcacctccctgtcccttgctcagaaaacccacaggctgtgggggcccgggagccaagcctggtgcgcgggcaggaaacgcatcctggagcaccagcttccctgccctgcccgcctcacggggtgcctgggggcgtgcctcagcctgctgctcctgtagtctgttctccacgccgggcctgtctccctgagcaggctgaacatgggcatacgagtgaccagcgtgatcgtgtccaggccagtgccgcattctgtgtggtccaagggaaaaccttctccaagtccacggcccgccctttcctctgctgggttacggccaagggcgccaggcctcactggaggacatggatcctggacccggccctcgaggctgctgccttccagtttccccatgtcctggacactcttggtctcaccatttgggaggccgacaggggatgcagagtggcctgttggaaaggccttatgtgaccccaggctgagtccctgagcagcctgctgaggccggaggggagaagagctgagcttctcccttgctgggccaggctcgggctgtggaatggctgccagctcccttcctgggagaggctgggtggggtccacagcaccttcctcccgtcccacaggaagctgtcttctgctgttggctgctgggggcgactgatgtttggatccctgagcaccctgccaatcccagactcaccttcccactctttccagagtccccagggagacacttaagggaaattaaactgcagagtgcaagagatgcctcagtcaagtcagccaaaaacacgcgggtcatccccaagccccagagaggtgagtcgggcagggcactcaactgctgcaggaggatggtcttatttctagcactttccacaggaggtaaatgtggtgggtttggggggtttttcaaatgcatcagtgtctggaatgggttctaagctgctaaataattcttagaggtaaatgacagacatgttgccctagatgtagctagacagccttccctctacagtgaagtctcctccaccctcagtgacagagccccgatgacacggacacctcggctgctgtcacttccctggttcgggcctcccacaggctttgaattgaaggcgagtgcctcagaatttgcatccattgttctgtctttcctgggaagttattcatcctggtggccagcccaccgacaaaatggatttggatctactggacctgaatcccagaattattgctgcaattaagaaaggtacatttatttctatttacataaagggtgtgggtgggtgtgtgcagtttatataaggcaggttaacaaaacgctggctggctaagccttccttcctttgcctaccctgattattaaaccgagggcgggatgtactatgggattttcaggtgtgtgtgtgtgtgtgtgtgtgtgtgtgttcttaactacatggatttctttcagttacttttatttttatcaaagtaatacatgcatattgtctaaaaggtaaaatggagccacataaagtcttttagttttttttttttggagacggggtctcgctctgtcacccaggcttgagtgcagtggtgcgatctcagctcagtgcaagctccgcctcccggggttcacaccattctcctgcctcagcctcccgagtagctgggactacaggcgccagtcaccacgcccggctaatttttttgtaaatttagtagagacagggtttcactgttttagccaggatggtcttgatctcctgacctcgtgatccgcccgcctcagcctcccaaagtgctgggattacaggcatgagccaccgcacccggccgtcttttagttatttttttaaaaaatatttacatctgggctcctaaacgtgtttatgttgtaatgtttgatttgtcagtgttactgattatccatggacttctcttgggggctgtgaggactgagcgtgcctacacctgtgtaccccaacttcctctccccccagctccctgcccatacttagaacctagtttgggtgacatcagctgtcagggttgtgactgggtgcatactggccattgttgaacctggtgtggtggtgcaggggatggttttctttcttacagcatcttttttcgcccgagttagtaaatgctcaaaactcaggccccacgtgcagcccctgccccctgctccccatgccagccgcctggctgtcatccggggaccctcctgccagcttccatcctcccccgtctccccgggcctcagctacgtgaacctcagcacgctgtctgtggcgagaagccggagtgctcatggagctgccgcagcagcctggtgacagggcagggcctcgctgtcctgaccctccatccttggctgttggtttttatcctcctgttggtggccttgtgatcacagctgctgccacagctgcagacacgacgcttgcagaccagggacagagaagggctcagccagggagttcctttctcacctgtgtctcttatccaaaaaccaatgtttccagaagtccctgcagacttcacggctgtgaagggggctggggctgtgaggcttaccagggggagcgccctgccacagccccgatcccggtgagtcctcagggcccacagagccttctggagcagcctgtctgcgggaagccccctccgctggatctggtgaaacccaggggcgctttcttcattcccacccttccatctccttgtgttttctgtgtggcttttctgaagatcacaccagtgcttactgttttccagccgcacaatggttgtcttttcactgcagcgttcagcgcacccgtgttgagggggtttctgatgtggtgggtgtaagtccccgtggccgggtggggcgcttcgtccaccactgctccctctcgtgtgcgcttcctcgcacttccctgatcggctgatcagtctgcagcatttgtcgtctttctacaagtttgaaattagaaagtgatgcacttatctgagtccaaaattaacttccttgccctcctccccagatggcaggtcctggggatctgcacccctgtaactgctgccaccgccgttctgattcgcacatgctctgccccctgccctgactgccctgcgcagctggcgtttggacctgggctctgctaccctcccagcgctcccctccccagggcacatgtcctctcccgcggctcagcccagatccatgcctggtgggcgggtggtggaaagctcggtgctggttttttcctgcccccttctggagcactgtctccagctggcatggaactgggtgcctgtcgtttcttctcagtaccggaacctgctctcagcaccgggacctgcccagccctgtcttctggcttctgccccagctcacgaggctggtatctgtccgagtgccaggactcagggcgcagtgtccagcagccctttcctcgtgcctgtgcatcggccacactgtgtccagggtttccagggagcaggggatccggtccctacccaccttgtccccagaatcggaagcacggtgctctcacagtgctcttaacaaagcaccttttgtcactgtgttgccctgcgttgtgacagtctgacattttcctgtaatttatctgtgttatttcagccaaactgaaatcggtaaaggaggttttacacttttctggaccagacttgaagagactgaccaacctctccagccccgaggtctggcacttgctgagaacggcctccttacacttgcggggaagcagcatccttacaggtaggtgggccctggcatctctgccaggggtgacatgtggctccagcatcatggtcccagtggtgcagggcaggggctgtgcagacttcacccagggaccagcctcagggcgtgtggcagctgctccagccccagagttcccatcttgcttgtcctacacccatggggctgtggtcacagcatcgggtcagaagatgcgtgaggtggacacgggctgtgggacctcctggggaccttgctccatggaccagaggagggggtgcaggaagcaggggtggatttggcagtcagcacccagagcccttcaggctctggcagggtgggaacggtgtgagatggggccctggccacggtcccaccaccacgtgtgggaaaccaggtctcagcaggggaaggaggtacccagggaaccccatgcgcctggacggacaaggtttccatccctgcatctcagcaggccctagtaggcagcggggtcctggcatgagcagggccctctctcccctgcaggtggctcagtggcccaggccccgaggaacgtgctgaacttggggctgccgtggtgggcaggtgccacggccacacacacggtgctgtgggcagggctctgggcaggcctcacagtcagggtggcctgctccacctggacggggtgcccaaggcagtgtgcagactccaagggaggggctgctcctcccggcccaggccccaggccaagagcgcagcctgcaccgcgtgtcccaccttgagccttgccctgaggggcttcggtgtcgtggaggaggctgtgtcaaatggctcatccaaggccctttagccaagaggctgagaccagcattgctccagaatggtatctgtcacagagaactgacggcatgtggtgtgcatgtgtgcgcgcctgcgggagcccattaaagccgcttgagaactgttcagcaccccagggcatcccagctggacagagctgtgcctttttcttcacatggaggctgttagggagcgcctcggggctctctggaagctttggctgaaggcgtctggtgctgcaattgccccatagggggatccctgcgggcatgtgatggtggccctggggctccccctgactctgcatctcaggtgcacccgcccttcccggctgggcccccctccctgccctcagcaccttgctcacccccatgaccgcaggcacctgtgctccagccacactgcacctggcacaggcaggctgaccatgcctcccgcagtccccagccctgcccgcaggcccaggagagtcaggcctgacactatccctgccctttagcactgcagctgcaccagcagaaggagcggttccccacgcagcaccagcgcctgagcctgggctgcccggtgctggacgcgctgctccgcggtggcctgcccctggacggcatcactgagctggccggacgcagctcggcagggaagacccagctggcgctgcagctctgcctggctgtgcagttcccgcggcagcacggaggcctggaggctggtgagtggccaccccttccgtggggtctgggcaggtgggcggcccctgctttgtgtgggacagctttccgttgaggtggggcagtggccgcctcttgcgctgttcctaccattgcgtctccctccttctcaccctgattgccctcgctccttccagaacagggagggggaagtgaggctgggctcagctgacagcaggaggggtgggagggtacgaaccccaccaccaggcagccggccctcagcagagctaggcccccaggggtcgctggctgagcacagcgatgccggcccacgttccgcacagctgccaagcccagagtccacagagccagcaacgcagggagggcagcacagcctttccccgggtgccccgccgccaggccaggtatgctcctggcgcggccccgtgagcctgtacgctctgtctgtgaaacgagggttccctgcattggactaaagcgttcagagcatgcctgcctgggtctctcaggtgttaaaagttcacgtagttttaaactgtgagctgtgagtaggagagatgtttctcagtagctccttaacttttaaactaattccctggtgtcaacatgcgattcccacgttgtcttaaactccacgtgaacagagtggcagtattttttcatcggtggcacctccgagcacatctgctaggctcacttcccacacagggccggaccccaggccctggacccacaggcccagccagccacctcctcacgggcctgacctgccagcagcggtgtggctgggaacctcacctctgccaccctcaggtcagcgtcatccccaggacccagggtgtgctgtgcctgcctgagcttcagtgctgggtggagggtgaggggtctcctgagcctccgtgtcgggtggagggtgaggggtctcctgagagcccagctggggtctgctcacgccacaggcatttttgtccctgcagcccaggggagggcaccctcttgtcaggtgcctgagtccctgcggctggtcttggggatgagcctggagacagccagaagccgggaggacaggagttggccttgaaaatgggagtctcccgcttaccgcacggaagagctgctgtgaggtggaggcgggactcgagcgtgctcaggaacgggacgggagccgccctcattctccagcgtcctccgtgccaggcttcgtgcaaatctgatttgtgcaatgactccccctcagcttccaccccgttggccttttcagtgaagcccacactccccgatacccagggacacagaagccttaggacaccctccctgaatcccccagctgtgcccagcccagtgactgctgcgggatgacagcacagtccagccttgcgggccaggggaagggagggggccccacggccactgtgaccacatgcaaggttaggggtcagatgtgctttcctggggaaatgacttcctttcctggatccaatctaaaggcccgaattttgaaaagaaagcggcaggcgggctctgaagtgattccgactcccgtgcttaagccgcgtgaggctctcccaggcctgctggggccccgcccaccgctgggctgtccacagccaccctcctgccagcttcacgatgtccccatgactgtgcagcccctacataacgtcaccccaacaaaaacacgctgcttgaccggttccacctgcttccgagccttccagcccagcctctctccagccaacaggacggaggaagcccagggccccgaccttcctgtggctcctgactaggggcacagtcactgctggggacactggtggggaagggaaccagccacaaaagggatgtggcctcccaaggcagtatttatacgttcctggcctcaagcgggccagatgcttctcagaagcttagttctgacacagaatggggcggggggttcctgacccatttttgcaactcttctttacgtttgaaattctgtcaaagcaaaatcagctcagaattaaaggttacgcggacactcacaaacaggctgcatgacacggcgtgggggcactggctctcccacaactgcatgtgccactgcaggaacaggacgacgccccgtgggccacggggtcctggctgggcagccttcctggcatagtcagtgcttagagagctcgccggccttgtctttttgtttttgttttgcaggaaactggagttttattattactcaaatcagtccccctaagccttcctgttttttaaattgagatgtaatttacatgccataaaattccctctaaaagtgtacagttcggcctgataggcgcagtacctcatgcctgtaatcccagcactttgggaggccgaggctgaggcaggcggatcatgaagtcaggagttcgagagcagcctgaccaacatggtgaaacccagtctctactaaaaatacaaaaattagctgggcgtggtagcgcacgccttgtaatcccagctactcagaaggctgaggcaggagaatcacttgaacccgggaggcagaggttgcagtgagccgagatcgcaccactgcactccagcctgggcgacagagtgagtctcttgtctctcaaaaattaaaataaaataaataaattcagtggcttttaatagaagcacaaagttctgtgcccgtcaccactatccaattccagaacagttccctcaccccaaaaggaaaccctacccatgagcagtcagcccccacccccagcagcctgcctcccctttccctacctgtgactcttcctgtcctgggagctccatgcaagtgcagccggacagcacgtggtctcgtgacaggcttcctgcattggcattgtgttttcgaggttcatccgtgctggagcaggtgtcagaactgccttcccttttaagattcgatcatcccactgtaaggatgggccgcacttcattcgtccactcctcagttgatggcctttgggccgtctccccccgggctgtcatgaaacgtgctacggtggacgtgctttctcttgggtatctacctaggagtggggctgctgagtcatgtgatttgtttaactttttaaggaagtaccgattgttttccgagctgcaccattttacattcctagcggcagtgcacaggggtcaggggtctgcctcctacacatcctcaccaacacgtgtcttttcaagctggctttttgaatttcaccatggagcccagattgcaggagctttgaagagaggaaacgcttgctcagtgggggccttgagggtggccatgtgtcggggctcaggggccatttccagaaggcgttgccctgatgctgccacttgctccctgccctgcagtggggaacggaggttcacagggggaaggaggggcagggtggagcaggagaggcctcccatctgtggccattccagcccagggcccaggacaggggaagtccttgcctgggtgtcagaagtggagacccagcccatattcctcctgaggggtcacctggccccggaggtggctgccagtgggagggtgagaaaaagcaccagcctcctccctccccaggcgaggggcaaagaacctgtgaggggcagagagttagaaatggcgggagacatctgcacttgatttgtgtggcagtcacaggcccgtctggagtcccctgggcacatcaggcactcttgcttcccaggagccgtctacatctgcacggaagacgccttcccgcacaagcgcctgcagcagctcatggcccagcagccgcggctgcgcactgacgttccaggagagctgcttcagaagctccgatttggcagccagatcttcatcgagcacgtggccgatgtggtgagtgtgggagaagccccatgacacccccaaggcaagctattcaggaccattggggcaggtgtagccaccacggcaatggggtctcacagcagggcagggagagttggggctcagctctgaacacagcatgggtcatgggggtttacgcccgaggagcaggtggggtcagaggatggagagtgactgagaggaactggcaggggagggaattctggctaaagcatcctgccaggacccttgctgaaggtgtgccttggggatcagacggcctctggggactgtggaggatggaccagtcagctactgagggcgactggatacggagagcaggggtcctgctacaatctcagcagggattgccaaaactggatttcatgaggacgtgcacagatgggcctaggaggaggctcaggagcctgacggcagtttggccaaacagaatcctggccaggagtggctgtgggccaggcaggcagggcggcaggctgcgacacccagttacatctgaatctcaggcagctttgaagcgtgttctagaatgaggatgcccatattcagatcaactttcttcatgatctgaaactcagatgtaactgggcgcctgtacaccatctgtcaaccttgcccatgaagacggagtggggaagagaagccccaggcgggtggcaaggacctcctctgggctgtgggcccctgaccagctgccccaggagaccaccgccctgagaaggatgcgacctgctctccaggctgctgccctggtgagatagctgtgttggtttccccttgcctctgaggggaagacagccctcactaggggcacaggggctccacctggccaaggcctgctgggcacccagctcagacaggtgacctcagatccttgaccactgcctggctgctggcttccctgcagacactggctgggcttggaggagggacctatggcagggccttgcagagagcaggggccactcaccgggggccagtggagtccgtcctgtagccaagaagcaggcaagagaggctgggacccatccctgcagctggggcagcagtgctgtgagctgtcagtgcttagtttatagacatcatcctgggagggagaagtgatgaagtagaaaagacgcagaagaaaagatgggacgtttgggagtaaacccctgaccaaaggcaagtaaggaaattccaccctgtgcagggggagcggctgccatgtccagcccaccctagacatggctgtggcctggcagagcagctcctgggtgggccttcccccacttctcttttttttttttaagacagtctcgctctgtcgcccaggctggagtacagtggtgcaatctcagctcactgcaagctccacctcccgggttcacgccattctcttgccttagcctccagagtaggtgggactacaggcgcccaccaacacgcccagctaattctttgtatctttaatagagacggggtttcaccatgttagccaggatggtctcgatctcctgacctggtgatccgcccacctcggcctcccaaagtgctgggattacaggcgtgagccaccgtgcccgccagccttcccccacttctaagaggtcttataaaaactttcaagtaaagcataaggcatataaacttttaatttaaaaaaatgtacaataaaatacgttatcgcacacaacgtgaggaagttacacatgggaagggagccgtgggcccagctcatgccccaggtctcctgggagagaccacgccgcaccagggcaccagcttaggcccagccccagccccaaggtcacgccagccgtgtggttattagtatcatgtcctatgcacacagacgcaggagaaatgagtgagcgctgcggctcccggccaggggccctccctgccgccctggctgtcccgggccagctccgggccacactcggcagtcccaccctggagcggggccaggttggggtcactgcaagagaagatagaaggtcagggctgggccgccaaaacctgacagtgttactaagttctgttctggaaacagctctctggggaacccccaccccaagtctgcctagagaagagggtgttgctggttgtgagcctccctggggccgaggggtcatgggggactggtgcgtctttggtctctgctccctggagcaccaaaggcctgcgtctggcacgggggaagccaggggtgtggacacagagccttctcttgcataagcagagcctggtgccattcccacccccccactctgtggcccttgggcttgcatgaggatggggaccctgagccaagcccctcttggaggcccagcctggcagctagcagcagtcaccacttgcccatccccagctccccccagtccctgcatgtgcaaagtccctccctggcccagctgcctgcttcctggggctgcaggccatgggactcacgttagcggtggcgtcttccaggccactgctgctgctgtcgttttccacaaaaagaggctcggccagagacgccctggagatgaagcacagacgagtttcactcagggcgtgcaggcggccctcaggcgtcttcagagctccgggcgtgacaccagcgtgtggctgcagaccttggacttgagggacagcctaggggccccttagcagcctccatctggccagagctgctggcaaggcccgtggggcctgaactacactgcttggtgccaggagcagctgtgtcaccctcccccatcaccatggctcaccaagctgtgcggtcagaggccagaccagccatgccaatggctctggcacccacaggccacggcagcacccagagggaggccgaggacacctgccttcactgggggggtcctcccctggaagctctcctgggagctggtgggcacagggctgtttccaccccttggccaggccaggccagctcagagcacagggctaaggcctggatgcacgggaggcactggccttgagggtgtctcaacctacagccccatcctgacccccaggtggtctcccagagtgccccacgccttggcagaggcaggccaggcctgactcgcctgagtaacgcctgaagggcatcaggcccctgccttgctgagcgtctgaagaggtcatggccaccacgggctggctttggtggcactgtggccaggtttgggtggtctgagtacctggtgcggggccactgaaggagggggctggttgctgctgacctgtgagggggagagggtgaaaccatggcagaaggagagcagacccccgcaaggactcaggagcctgcgcaaaggacacctctacagaggacggtgttggcacagccaaggggtgactgcctgggggggccagaggaaggacatggggccaagggaaccagttgtgtgagcctgaagcttctatagttggggcctctttgagaaaaatacagaattgggctcagagtatggggactacagagtatgggcactgtgagccccaggtgggtaggaaggttttcagacggtcgagtgacagtccaaacggggtctggtcacctggggcggggacttgctgaccagcatagacaatgacagctgtccccacaggacaccttgttggagtgtgtgaataagaaggtccccgtactgctgtctcggggcatggctcgcctggtggtcatcgactcggtggcagccccattccgctgtgaatttgacagccaggcctccgcccccagggccaggcatctgcagtccctgggggccatgctgcgtgagctgagcagtgccttccagagccctgtgctgtgcatcaaccaggtgagcaccaaggcagggttgcacccctgagctcgtatttttagccaggatgcggaagcagagccggtctggaggtggggcgggtggcagtgaggtggcctccggctcctgcgggtagcagcctgtgcctaaccatcgagaagaccctcagccgttgcagctgacctggactgtgctcttccaggtgacagaggccatggaggagcagggcgcagcacacgggccgctggggtgagtgcagccatgtggtgtgtgcacctctgtgcaggtgccaggggcacagctgggccgaagtgggcggggccaccaagcctgagcgccacttgcctgcttcctgtttctcaggttctgggacgaacgtgtttccccagcccttggcataacctgggctaaccagctcctggtgagactgctggctgaccggctccgcgaggaagaggctgccctcggctgcccagcccggaccctgcgggtgctctctgccccccacctgcccccctcctcctgttcctacacgatcagtgccgaaggggtgcgagggacacctgggacccagtcccactgacacggtggcggctgcacaacagccctgcctgagaagccccgacacacggggctcgggcctttaaaacgcgtctgcctgggccgtggcacagctgggagcctggttcagacacagctcttccagggcagcggctccactttctcatccgaagatggtggccacagactgacccccatctgagctggggggatgttctgcctctccctgggtctggggacaggcccgcttgctgggtacctggtccccactgctgagctggcccttggggagaggtgattctcagggctggagcctggggtgtcctacagtgactccctgggagccgcctgcttcttctctccacatggaagcccaactggggttgcgtctgaggcctgccccctgggctggggcctcagaccccctcagccttgggaccgtgcccacgagggtctcccctcctgcacacagggcagtccttactcccccaccactcaggccacagtggggctgcaggcaggcggctcctcctcacccacctctgggtccttggctcccgggggccccacctcggcacacactgtgccccacaaaacttcagtgtggtacaaggtggagaaagcatatcccaccaacctccagtgtcagggtccaggagagcctgggggtggggggactgccttgtctctagtagtgtggcctgtgccagcaccacagccggtcagaggagcgcaggcagcgcagggctggcacgtgacaggctcgtcagccacctgggaacacagttctgggcaaagaggatccgaggttgagaggaaggagggtcccggtgtatcctggccctgggggtctgggcgtccagctcagccctggcctggctgggtggtattctggtagggatatggcaggactcctggcagggccacctgcaggaccctgtcctgcagtcccacactgtgcagacccagtcccacactgtggccaggccttacatctggctggaaagcagagcctcctgggaacacatctggctgcacaggctgaaatatccacccagcaggcagagtggcgtggcctccccatgggcacagtggtgacccccttgattcccaccgtacaaccccctccaccccccactcagtgcctccacatgctgcctggcacagaccaggcctttgacaaataaatgttcaatggatgcagttccagg

SEQ ID NO: 10139 - DNA, 17849 bp, Homo sapiens
aggacggcgggaagaggagtgcggaacccgcgggaggtgaggcccgccgagccgggctgcgagccgggctgcgagccgggcggcagcggggtcggaggtcgtgggcggcagcgggcgtgaggggtgaggcagggtcaaggggcgggggcggccgcgggtctccattgcccgagcctgtgggagcaggcgggcctggggctgcagcactcaccccgggagccccgccgcagctcgggtagcgttcaggcacctcgccggggccgggccgcgtgcgttcggagcggggaaggcggtctccggggcccccggtgcgcgcggggaggcgtccgctcaggggaggccgaggtgggcccggcgtgcgcccccggccttcgatgccttcgctcgtccgcctgggaccgcgctggcttcgcatcgaagtgggagaggtctgaacagttattttaatactttgatttggaaagaaaatcctttaggccgggcgcggtgctcacgcctgtaatccgagcactttgggaggccgaggcgggcggatcacgaggtcaggagttcaagaccagcctggccaacatggtgaaaccccgtctctactaaaaatacaaaaattagctgggtgtggtggcacgtgcctgtaatcccagctgcttgggaggctgaggcaggagaattgtttgaaccaggacccgggaggcggaggttgcagtgagccgagatcacattactgcactccagcctgggctacagaaaaagactccatctcagaaagcacacaaaaaaaagaagaaaatgtttgttcatcctgcctttaattccttattacaaggcgtgaatttttattgttttttttgagacagtctggctctgtcatccggggtggagtgcagtggcgtcttcacagctaggcacaacctcgacctcccaggctctcaagtagctgggaccgcaagcgccactacactggccagctatttttctttttttttttttttttcggtagagagtaggtcttgctgtgttgcccaggctggtcttgaactcctgggctcaggcgaccttggccgccttggcctcccacggtgctgggatgacaggcatcagcagtgttgaagcctgtgaggtggggtccctgtggctgactctgccctctcctggggccattggcagtgcaggggtccttgtgtgtggaggaaataaggagatgatcaaagtatgattccacgaatcacacggtttattgtcaaagaagatttgttctcgggttcacagtgctcagaggggaggagaggggaggaggtgaagacacctggcagggaagcagggcctccatggatggggtgcattcacggcagggaggtgagtggcagaacggccagggtccggttgctctgctgggatggagcgggcccctggagagtgagatctggtgagagttcgaggtttgccttggtagcagtggagagcgtgagagcgggagctctctgagaagctgggaccgaggtccagctcccaggccagcagcgtatagcttgcctcaaagcatctgcacaaccttcaagctgatgtctgtttttgcagtccagcagtcagggtcagtaactcacataagggagtgtctgacaaggtttaagtggcattcccaaggttgcggagttcactcaagtcctcacatatgtggtctgataagacatcacactcttgcaggggggtcaggtcaccccaaaacatcagactatgtaagtgctgtgaatcacttcaaagctacacagcaggtcccagggcccaaggcagaggagtgagtccacctcggaaggctcagagcagctccaggcagtaaccacggcatttccagagtctggtgtgtgagcctaacagctctggtgtgaccgtccgtactcacctagcagcacgtgacatcagctctccccctgaagtcattgctcagctcgggtgctgcaggaagacatacaggtctgtcttgggccagccccttgcctgctgtgggctgctccctgtgtgtggccttcaccccggtgtagagagatgggctggtcacacccctgcccctcacagcggcgagaggacagaggcatgtgccgggctgtctgtggagctcccaggccagtgtctgggatgcggcaggtgcttggtgttaaagggaaaatattccaggatatctgtgaaagcacgttaggcagagaccaggctttcattcagaacctttgagagatgtgggaaccaccacactgcggtcttgcagtgggagagaggctgggctcagctctgaacaggccatgggctggtggcggcttacagctccagagctgggcaggggcagaggatggaaggttgctaagaggaacccccaggggcgaaggggatgcaggttcaactgacctgccagatcaggccgcccgggggacagtggaagatgaggcgcctaatcagctgtcaagggtgatgggacacgggaggaggtcgtcactaaacagactttgagccaggcctgttaaaccaagttctcagcaggatgtgcacagagggcccaggaggagcctcaggagccggactgccgttggccaaccggtgagtctgttatccgtcagtggacactctgcttccaggtgccttggcctcggcccgcgtcctgaaggcgggagacgttgcagccacgtgctggccttcccggtgctcctgccagcgtcccgctgcttgacacagtccaagttttgtatccagacccagcctgggacagcagcctcccgacagcccccaggcccagcctgtctgtgacagtcacgcctgctcagggaaccatccctccgtgcagatctgggctgtgttttgggtggtacctcgggtgtggggtcccctaccaggtgcgaggttcatactccccaggctgcctcctgtcctcagggcttggagagtcccatgttctgaaaatgacctcttttcgagccgggcaaggccgcatctcctttggcagtgtagtgtcttccctggaggtggcattcctttttgatttgccttctgtgcttgggaacctcacttcctcactctggccagctctgccagcagtttggagctggttcagcgccccaccgccctgccttggcctgcgcccggccctccagggtggcttctcgccagttcctgtcaggcctgcctgggcaaccaggcctgggcacctccctgtcccttgctcagaaaacccacaggctgtgggggcccgggagccaagcctggtgcgcgggcaggaaacgcatcctggagcaccagcttccctgccctgcccgcctcacggggtgcctgggggcgtgcctcagcctgctgctcctgtagtctgttcctgtctccctgagcaggctgaacatgggcatacgagtgaccagcgtgatcgtgtccaggccagtgccgcattctgtgtggtccaagggaaaaccttctccaagtccacggcccgccctttcctctgctgggttacggccaagggcgccaggcctcactggaggacatggatcctggacccggccctcgaggctgctgccttccagtttccccatgtcctggacactcttggtctcaccatttgggaggccgacaggggatgcagagtggcctgttggaaaggccttatgtgaccccaggctgagtccctgagcagcctgctgaggccggaggggagaagagctgagcttctcccttgctgggccaggctcgggctgtggaatggctgccagctcccttcctgggagaggctgggtggggtccacagcaccttcctcccgtcccacaggaagctgtcttctgctgttggctgctgggggcgactgatgtttggatccctgagcaccctgccaatcccagactcaccttcccactctttccagagtccccagggagacacttaagggaaattaaactgcagagtgcaagagatgcctcagtcaagtcagccaaaaacacgcgggtcatccccaagccccagagaggtgagtcgggcagggcactcaactgctgcaggaggatggtcttatttctagcactttccacaggaggtaaatgtggtgggtttggggggtttttcaaatgcatcagtgtctggaatgggttctaagctgctaaataattcttagaggtaaatgacagacatgttgccctagatgtagctagacagccttccctctacagtgaagtctcctccaccctcagtgacagagccccgatgacacggacacctcggctgctgtcacttccctggttcgggcctcccacaggctttgaattgaaggcgagtgcctcagaatttgcatccattgttctgtctttcctgggaagttattcatcctggtggccagcccaccgacaaaatggatttggatctactggacctgaatcccagaattattgctgcaattaagaaaggtacatttatttctatttacataaagggtgtgggtgggtgtgtgcagtttatataaggcaggttaacaaaacgctggctggctaagccttccttcctttgcctaccctgattattaaaccgagggcgggatgtactatgggattttcaggtgtgtgtgtgtgtgtgtgtgtgtgtgtgttcttaactacatggatttctttcagttacttttatttttatcaaagtaatacatgcatattgtctaaaaggtaaaatggagccacataaagtcttttagttttttttttttggagacggggtctcgctctgtcacccaggcttgagtgcagtggtgcgatctcagctcagtgcaagctccgcctcccggggttcacaccattctcctgcctcagcctcccgagtagctgggactacaggcgccagtcaccacgcccggctaatttttttgtaaatttagtagagacagggtttcactgttttagccaggatggtcttgatctcctgacctcgtgatccgcccgcctcagcctcccaaagtgctgggattacaggcatgagccaccgcacccggccgtcttttagttatttttttaaaaaatatttacatctgggctcctaaacgtgtttatgttgtaatgtttgatttgtcagtgttactgattatccatggacttctcttgggggctgtgaggactgagcgtgcctacacctgtgtaccccaacttcctctccccccagctccctgcccatacttagaacctagtttgggtgacatcagctgtcagggttgtgactgggtgcatactggccattgttgaacctggtgtggtggtgcaggggatggttttctttcttacagcatcttttttcgcccgagttagtaaatgctcaaaactcaggccccacgtgcagcccctgccccctgctccccatgccagccgcctggctgtcatccggggaccctcctgccagcttccatcctcccccgtctccccgggcctcagctacgtgaacctcagcacgctgtctgtggcgagaagccggagtgctcatggagctgccgcagcagcctggtgacagggcagggcctcgctgtcctgaccctccatccttggctgttggtttttatcctcctgttggtggccttgtgatcacagctgctgccacagctgcagacacgacgcttgcagaccagggacagagaagggctcagccagggagttcctttctcacctgtgtctcttatccaaaaaccaatgtttccagaagtccctgcagacttcacggctgtgaagggggctggggctgtgaggcttaccagggggagcgccctgccacagccccgatcccggtgagtcctcagggcccacagagccttctggagcagcctgtctgcgggaagccccctccgctggatctggtgaaacccaggggcgctttcttcattcccacccttccatctccttgtgttttctgtgtggcttttctgaagatcacaccagtgcttactgttttccagccgcacaatggttgtcttttcactgcagcgttcagcgcacccgtgttgagggggtttctgatgtggtgggtgtaagtccccgtggccgggtggggcgcttcgtccaccactgctccctctcgtgtgcgcttcctcgcacttccctgatcggctgatcagtctgcagcatttgtcgtctttctacaagtttgaaattagaaagtgatgcacttatctgagtccaaaattaacttccttgccctcctccccagatggcaggtcctggggatctgcacccctgtaactgctgccaccgccgttctgattcgcacatgctctgccccctgccctgactgccctgcgcagctggcgtttggacctgggctctgctaccctcccagcgctcccctccccagggcacatgtcctctcccgcggctcagcccagatccatgcctggtgggcgggtggtggaaagctcggtgctggttttttcctgcccccttctggagcactgtctccagctggcatggaactgggtgcctgtcgtttcttctcagtaccggaacctgctctcagcaccgggacctgcccagccctgtcttctggcttctgccccagctcacgaggctggtatctgtccgagtgccaggactcagggcgcagtgtccagcagccctttcctcgtgcctgtgcatcggccacactgtgtccagggtttccagggagcaggggatccggtccctacccaccttgtccccagaatcggaagcacggtgctctcacagtgctcttaacaaagcaccttttgtcactgtgttgccctgcgttgtgacagtctgacattttcctgtaatttatctgtgttatttcagccaaactgaaatcggtaaaggaggttttacacttttctggaccagacttgaagagactgaccaacctctccagccccgaggtctggcacttgctgagaacggcctccttacacttgcggggaagcagcatccttacaggtaggtgggccctggcatctctgccaggggtgacatgtggctccagcatcatggtcccagtggtgcagggcaggggctgtgcagacttcacccagggaccagcctcagggcgtgtggcagctgctccagccccagagttcccatcttgcttgtcctacacccatggggctgtggtcacagcatcgggtcagaagatgcgtgaggtggacacgggctgtgggacctcctggggaccttgctccatggaccagaggagggggtgcaggaagcaggggtggatttggcagtcagcacccagagcccttcaggctctggcagggtgggaacggtgtgagatggggccctggccacggtcccaccaccacgtgtgggaaaccaggtctcagcaggggaaggaggtacccagggaaccccatgcgcctggacggacaaggtttccatccctgcatctcagcaggccctagtaggcagcggggtcctggcatgagcagggccctctctcccctgcaggtggctcagtggcccaggccccgaggaacgtgctgaacttggggctgccgtggtgggcaggtgccacggccacacacacggtgctgtgggcagggctctgggcaggcctcacagtcagggtggcctgctccacctggacggggtgcccaaggcagtgtgcagactccaagggaggggctgctcctcccggcccaggccccaggccaagagcgcagcctgcaccgcatgtcccaccttgagccttgccctgaggggcttcggtgtcgtggaggaggctgtgtcaaatggctcatccaaggccctttagccaagaggctgagaccagcattgctccagaatggtatctgtcacagagaactgacggcatgtggtgtgcatgtgtgcgcgcctgcgggagcccattaaagccgcttgagaactgttcagcaccccagggcatcccagctggacagagctgtgcctttttcttcacatggaggctgttagggagcgcctcggggctctctggaagctttggctgaaggcgtctggtgctgcaattgccccatagggggatccctgcgggcatgtgatggtggccctggggctccccctgactctgcatctcaggtgcacccgcccttcccggctgggcccccctccctgccctcagcaccttgctcacccccatgaccgcaggcacctgtgctccagccacactgcacctggcacaggcaggctgaccatgcctcccgcagtccccagccctgcccgcaggcccaggagagtcaggcctgacactatccctgccctttagcactgcagctgcaccagcagaaggagcggttccccacgcagcaccagcgcctgagcctgggctgcccggtgctggacgcgctgctccgcggtggcctgcccctggacggcatcactgagctggccggacgcagctcggcagggaagacccagctggcgctgcagctctgcctggctgtgcagttcccgcggcagcacggaggcctggaggctggtgagtggccaccccttccgtggggtctgggcaggtgggcggcccctgctttgtgtgggacagctttccgttgaggtggggcagtggccgcctcttgcgctgttcctaccattgcgtctccctccttctcaccctgattgccctcgctccttccagaacagggagggggaagtgaggctgggctcagctgacagcaggaggggtgggagggtacgaaccccaccaccaggcagccggccctcagcagagctaggcccccaggggtcgctggctgagcacagcgatgccggcccacgttccgcacagctgccaagcccagagtccacagagccagcaacgcagggagggcagcacagcctttccccgggtgccccgccgccaggccaggtatgctcctggcgcggccccgtgagcctgtacgctctgtctgtgaaacgagggttccctgcattggactaaagcgttcagagcatgcctgcctgggtctctcaggtgttaaaagttcacgtagttttaaactgtgagctgtgaggaggagagatgtttctcagtagctccttaacttttaaactaattccctggtgtcaacatgcgattcccacgttgtcttaaactccacgtgaacagagtggcagtattttttcatcggtggcacctccgagcacatctgctaggctcacttcccacacagggccggaccccaggccctggacccacaggcccagccagccacctcctcacgggcctgacctgccagcagcggtgtggctgggaacctcacctctgccaccctcaggtcagcgtcatccccaggacccagggtgtgctgtgcctgcctgagcttcagtgctgggtggagggtgaggggtctcctgagcctccgtgtcgggtggagggtgaggggtctcctgagagcccagctggggtctgctcacgccacaggcatttttgtccctgcagcccaggggagggcaccctcttgtcaggtgcctgagtccctgcggctggtcttggggatgagcctggagacagccagaagccgggaggacaggagttggccttgaaaatgggagtctcccgcttaccgcacggaagagctgctgtgaggtggaggcgggactcgagcgtgctcaggaacgggacgggagccgccctcattctccagcgtcctccgtgccaggcttcgtgcaaatctgatttgtgcaatgactccccctcagcttccaccccgttggccttttcagtgaagcccacactccccgatacccagggacacagaagccttaggacaccctccctgaatcccccagctgtgcccagcccagtgactgctgcgggatgacagcacagtccagccttgcgggccaggggaagggagggggccccacggccaccgtgaccacatgcaaggttaggggtcagatgtgctttcctggggaaatgacttcctttcctggatccaatctaaaggcccgaattttgaaaagaaagcggcaggcgggctctgaagtgattccgactcccgtgcttaagccgcgtgaggctctcccaggcctgctggggccccgcccaccgctgggctgtccacagccaccctcctgccagcttcacgatgtccccatgactgtgcagcccctacataacgtcaccccaacaaaaacacgctgcttgaccggttccacctgcttccgagccttccagcccagcctctctccagccaacaggacggaggaagcccagggccccgaccttcctgtggctcctgactaggggcacagtcactgctggggacactggtggggaagggaaccagccacaaaagggatgtggcctcccaaggcagtatttatacgttcctggcctcaagcgggccagatgcttctcagaagcttagttctgacacagaatggggcggggggttcctgacccatttttgcaactcttctttacgtttgaaattctgtcaaagcaaaatcagctcagaattaaaggttacgcggacactcacaaacaggctgcatgacacggcgtgggggcactggctctcccacaactgcatgtgccactgcaggaacaggacgacgccccgtgggccacggggtcctggctgggcagccttcctggcatagtcagtgcttagagagctcgccggccttgtctttttgtttttgttttgcaggaaactggagttttattattactcaaatcagtccccctaagccttcctgttttttaaattgagatgtaatttacatgccataaaattccctctaaaagtgtacagttcggcctgataggcgcagtacctcatgcctgtaatcccagcactttgggaggccgaggctgaggcaggcggatcatgaagtcaggagttcgagagcagcctgaccaacatggtgaaacccagtctctactaaaaatacaaaaattagctgggcgtggtagcgcacgccttgtaatcccagctactcagaaggctgaggcaggagaatcacttgaacccgggaggcagaggttgcagtgagccgagatcgcaccactgcactccagcctgggcgacagagtgagtctcttgtctctcaaaaattaaaataaaataaataaattcagtggcttttaatagaagcacaaagttctgtgcccgtcaccactatccaattccagaacagttccctcaccccaaaaggaaaccctacccatgagcagtcagcccccacccccagcagcctgcctcccctttccctacctgtgactcttcctgtcctgggagctccatgcaagtgcagccggacagcacgtggtctcgtgacaggcttcctgcattggcattgtgttttcgaggttcatccgtgctggagcaggtgtcagaactgccttcccttttaagattcgatcatcccactgtaaggatgggccgcacttcattcgtccactcctcagttgatggcctttgggccgtctccccccgggctgtcatgaaacgtgctacggtggacgttctttctcttgggtatctacctaggagtggggctgctgagtcatgtgatttgtttaactttttaaggaagtaccgattgttttccgagctgcaccattttacattcctagcggcagtgcacaggggtcaggggtctgcctcctacacatcctcaccaacacgtgtcttttcaagctggctttttgaatttcaccatggagcccagattgcaggagctttgaagagaggaaacgcttgctcagtgggggccttgagggtggccatgtgtcggggctcaggggccatttccagaaggcgttgccctgatgctgccacttgctccctgccctgcagtggggaacggaggttcacagggggaaggaggggcagggtggagcaggagaggcctcccatctgtggccattccagcccagggcccaggacaggggaagtccttgcctgggtgtcagaagtggagacccagcccatattcctcctgaggggtcacctggccccggaggtggctgccagtgggagggtgagaaaaagcaccagcctcctccctccccaggcgaggggcaaagaacctgtgaggggcagagagttagaaatggcgggagacatctgcacttgatttgtgtggcagtcacaggcccgtctggagtcccctgggcacatcaggcactcttgcttcccaggagccgtctacatctgcacggaagacgccttcccgcacaagcgcctgcagcagctcatggcccagcagccgcggctgcgcactgacgttccaggagagctgcttcagaagctccgatttggcagccagatcttcatcgagcacgtggccgatgtggtgagtgtgggagaagccccatgacacccccaaggcaagctattcaggaccattggggcaggtgtagccaccacggcaatggggtctcacagcagggcagggagagttggggctcagctctgaacacagcatgggtcatgggggtttacgcccgaggagcaggtggggtcagaggatggagagtgactgagaggaactggcaggggagggaattctggctaaagcatcctgccaggacccttgctgaaggtgtgccttggggatcagacggcctctggggactgtggaggatggaccagtcagctactgagggcgactggatacggagagcaggggtcctgctacaatctcagcagggattgccaaaactggatttcatgaggacgtgcacagatgggcctaggaggaggctcaggagcctgacggcagtttggccaaacagaatcctggccaggagtggctgtgggccaggcaggcagggcggcaggctgcgacacccagttacatctgaatctcaggcagctttgaagcgtgttctagaatgaggatgcccatattcagatcaactttcttcatgatctgaaactcagatgtaactgggcgcctgtacaccatctgtcaaccttgcccatgaagacggagtggggaagagaagccccaggcgggtggcaaggacctcctctgggctgtgggcccctgaccagctgccccaggagaccaccgccctgagaaggatgcgacctgctctccaggctgctgccctggtgagatagctgtgttggtttccccttgcccctgaggggaagacggccctcactaggggcacaggggctccacctggccaaggcctgctgggcacccagctcagacaggtgacctcagatccttgaccactgcctggctgctggcttccctgcagacactggctgggcttggaggagggacctatggcagggccttgcagagagcaggggccactcaccgggggccagtggagtccgtcctgtagccaagaagcaggcaagagaggctgggacccatccctgcagctggggcagcagtgctgtgagctgtcagtgcttagtttatagacatcatcctgggagggagaagtgatgaagtagaaaagacgcagaagaaaagatgggacgtttgggagtaaacccctgaccaaaggcaagtaaggaaattccaccctgtgcagggggagcggctgccatgtccagcccaccctagacatggctgtggcctggcagagcagctcctgggtgggccttcccccacttctcttttttttttttaagacagtctcgctctgtcgcccaggctggagtacagtggtgcaatctcagctcactgcaagctccacctcccgggttcacgccattctcttgccttagcctccagagtaggtgggactacaggcgcccaccaacacgcccagctaattctttgtatctttaatagagacggggtttcaccatgttagccaggatggtctcgatctcctgacctggtgatccgcccacctcggcctcccaaagtgctgggattacaggcgtgagccaccgcgcccgccagccttcccccacttctaagaggtcttataaaaactttcaagtaaagcataaggcatataaacttttaatttaaaaaaatgtacaataaaatacgttatcgcacacaacgtgaggaagttacacatgggaagggagccgtgggcccagctcatgccccaggtctcctgggagagaccacgccgcaccagggcaccagcttaggcccagccccagccccaaggtcacgccagccgtgtggttattagtatcatgtcctatgcacacagacgcaggagaaatgagtgagcgctgcggctcccggccaggggccctccctgccgccctggctgtcccgggccagctccgggccacactcggcagtcccatcctggagcggggccaggtcggggtcactgcaagagaagatagaaggtcagggctgggccgccaaaacctgacagtgttactaagttctgttctggaaacagctctctggggaacccccaccccaagtctgcctagagaagagggtgttgctggttgtgagcctccctggggccgaggggtcatgggggactggtgcgtctttggtctctgctccctggagcaccaaaggcctgcgtctggcacgggggaagccaggggtgtggacacagagccttctcttgcataagcagagcctggtgccattcccacccccccactctgtggcccttgggcttgcatgaggatggggaccctgagccaagcccctcttggaggcccagcctggcagctagcagcagtcaccacttgcccatccccagctccccccagtccctgcatgtgcaaagtccctccctggcccagctgcctgcttcctggggctgcaggccgtgggactcacgttagcggtggcgtcttccaggccactgctgctgctgtcgttttccacaaaaagaggctcggccagagacgccctggagatgaagcacagacgagtttcactcagggcgtgcaggcggccctcaggcgtcttcagagctccgggcgtgacaccagcgtgtggctgcagaccttggacttgagggacagcctaggggccccttagcagcctccatctggccagagctgctggcaaggcccgtggggcctgaactacactgcttggtgccaggagcagctgtgtcaccctcccccatcaccatggctcaccaagctgtgcggtcagaggccaggccagccatgccaatggctctggcacccacaggccacggcagcacccagagggaggccgaggacacctgccttcactgggggggtcctcccctggaagctctcctgggagctggtgggcacagggctgtttccaccccttggccaggccaggccagctcagagcacagggctaaggcctggatgcacgggaggcactggccttgagggtgtctcaacctacagccccatcctgacccccaggtggtctcccagagtgccccacgccttggcagaggcaggccaggcctgactcgcctgagtaacgcctgaagggcatcaggcccctgccttgctgagcgtctgaagaggtcatggccaccacgggctggctttggtggcactgtggccaggtttgggtggtctgagtacctggtgcggggccactgaaggagggggctggttgctgctgacctgtgagggggagagggtgaaaccatggcagaaggagagcagacccccgcaaggactcaggagcctgcgcaaaggacacctctacagaggacggtgttggcacagccaaggggtgactgcctgggggggccagaggaaggacatggggccaagggaaccagttgtgtgagcctgaagcttctatagttggggcctctttgagaaaaatacagaattgggctcagagtatggggactacagagtatgggcactgtgagccccaggtgggtaggaaggttttcagacggtcgagtgacagtccaaacggggtctggtcacctggggcggggacttgctgaccagcatagacaatgacagctgtccccacaggacaccttgttggagtgtgtgaataagaaggtccccgtactgctgtctcggggcatggctcgcctggtggtcatcgactcggtggcagccccattccgctgtgaatttgacagccaggcctccgcccccagggccaggcatctgcagtccctgggggccacgctgcgtgagctgagcagtgccttccagagccctgtgctgtgcatcaaccaggtgagcaccaaggcagggttgcacccctgagctcgtatttttagccaggatgcggaagcagagccggtctggaggtggggcgggtggcagtgaggtggcctccggctcctgcgggtagcagcctgtgcctaaccatcgagaagaccctcagccgttgcagctgacctggactgtgctcttccaggtgacagaggccatggaggagcagggcgcagcacacgggccgctggggtgagtgcagccatgtggtgtgtgcacctctgtgcaggtgccaggggcacagctgggccgaagtgggcggggccaccaagcctgagcgccagcttgcctgcttcctgtttctcaggttctgggacgaacgtgtttccccagcccttggcataacctgggctaaccagctcctggtgagactgctggctgaccggctccgcgaggaagaggctgccctcggctgcccagcccggaccctgcgggtgctctctgccccccacctgcccccctcctcctgttcctacacgatcagtgccgaaggggtgcgagggacacctgggacccagtcccactgacacggtggcggctgcacaacagccctgcctgagaagccccgacacacggggctcgggcctttaaaacgcgtctgcctgggccgtggcacagctgggagcctggttcagacacagctcttccagggcagcggctccactttctcatccgaagatggtggccacagactgacccccatctgagctggggggatgttctgcctctccctgggtctggggacaggcccgcttgctgggtacctggtccccactgctgagctggcccttggggagaggtgattctcagggctggagcctggggtgtcctacagtgactccctgggagccgcctgcttcttctctccacatggaagcccaactggggttgcgtctgaggcctgccccctgggctggggcctcagaccccctcagccttgggaccgtgcccacgagggtctcccctcctgcacacagggcagtccttactcccccaccactcaggccacagtggggctgcaggcaggcggctcctcctcacccacctctgggtccttggctcccgggggccccacctcggcacacactgtgccccacaaaacttcagtgtggtacaaggtggagaaagcatatcccaccaacctccagtgtcagggtccaggagagcctgggggtggggggactgccttgtctctagtagtgtggcctgtgccagcaccacagccggtcagaggagcgcaggcagcgcagggctggcacgtgacaggctcgtcagccacctgggaacacagttctgggcaaagaggatccgaggttgagaggaaggagggtcccggtgtatcctggccctgggggtctgggcgtccagctcagccctggcctggctgggtggtattctggtagggatatggcaggactcctggcagggccacctgcaggaccctgtcctgcagtcccacactgtgcagacccagtcccacactgtggccaggccttacatctggctggaaagcagagcctcctgggaacacatctggctgcacaggctgaaatatccacccagcaggcagagtggcgtggcctccccatgggcacagtggtgacccccttgattcccaccgtacaaccccctccaccccccactcagtgcctccacatgctgcctggcacagaccaggcctttgacaaataaatgttcaatggatgcagttccagg

SEQ ID NO: 10140 - DNA, 126 bp, Homo sapiens
cggctcctccaggccgaacgggcttccgaaggcgcggtgttcgggcaccatgcgcaggccgctcggggagcgcaccagcttcttggcgtcgcggcgcgcggacacctcggaggacatgacgccgcc

SEQ ID NO: 10141 - DNA, 1957 bp, Homo sapiens
tgcaggaattctacaatggcaagtaagacattttatttctgtaattgaacataagcaattccaaatgcttttctaggcaagacatgccagcgattagaaaatgagacagcttaaagacagaggtacatttaacagagaaaacacgcctggaagctcggccggccccgcccatgctggctcagttcctgcccctggagggaaggggccgaggggcttcctgtcccagggaactcccaccacaggagtctgcagacgggctggcctggcagtcagtcccaggaacactgaccatccccttagggaggcaccacgccctggggagcacagttccaggccagggccatgggtcttgccctgaagaccctccctcagggaccacgcgccctgaccctcattgcctcaccatattataaaacactaaaaccgcttaagttcttccccacagagttggggaactaattgtaaacagaatacacgtctacatatcagccctgagacagctggccccgctgcacacgcagcctgctggccccagcaagacacggtcagagctggtaagtgctctacagcattcagaaatctgaccacagcgtacacacagctcacaagtcagtgcaaacagaagctaatgacatcctccaagaaaattccatacagttatgacaatggaaaacctgttatacattgtaaccatacatcattagcaatgtttaatacatcttactataaacactgaatttctaagtacatgatactcctagcagcttaatccagaaaataacgatgtgaatccctccaatactgtaaacacaagaccaagtgctgcccatgagagtgccccgtgccacccgcgggcaccaccggcctctgaggacccctgagccacacactgctgctgcttcagggaagcatccatgtcacaggacttccccaggggcctgatttctgccacagctgcaccaactacccagagatatgctgtccgcccacagatccagacgctcccatgccatggttgctggggacgggcgctgcacacacggctgctgtgggggggggcggggcgcagtgattattttgacagcaactctgaagaaacaggtgctgactctcgcgcggggttcctctcaccagaacgaccacacacaggaggagggatgcctgggcccaccacttctctcctctgaagggaaaaattcagaccgccagatgggaaatggctgaaatcactgcacttctattgggtggaagggttcaaacatcggggactcaggtactcagattcccttgccgcctccctctgaaacacgaaccttcctttatgagctggcttcagggaggccccctggcttctcttaccccaacacacagtgctcccacagccacagtgctgcagaggccacctcggccctaaagtcccatggctggaagccacagcaggctccacagaggccccacacaacctcgtctgcacccatcagtctgaagaggttaaaattcaactccatattcagccctatgtttattccttctaaatgccctttttcctttccagataactgtcactaagggaaactgtctgggttccaaactctgctcagcatcctcacagggagaaggcacccccaccacaagggaagctccggagccctcctccctgtcgcctgtgcacagacatagcccactacgggggcagccacggcacctgtcaggggaagctgctctacacccccctttttttggggggggttggcttctcacaacccatcaaattatatatgtatatatatgtatgtatatatatatatatacacacacacacatatatatatatatacacatggttttttttgctagacacagggactcgctgtgttgcccaagctgttcttgaactgggctcaagtgatcctcccgcctcagcctcccaaagtgctaagattataggattactggc

SEQ ID NO: 10142 - DNA, 126 bp, Homo sapiens; identical to SEQ ID NO: 10140

SEQ ID NO: 10143 - DNA, 1797 bp, Homo sapiens
gcaggaattctacaatggcaagtaagacattttatttctgtaattgaacataagcaattccaaatgcttttctaggcaagacatgccagcgattagaaaatgagacagcttaaagacagaggtacatttaacagagaaaacacgcctggaagctcggccggccccgcccatgctggctcagttcctgcccctggagggaaggggccgaggggcttcccgtcccagggaactcccaccacaggagtctgcagacgggctggcctggcagtcagtcccagaacactgaccatccccttagggaggcaccacgccctggggagcacagttccaggccagggccatgggtcttgccctgaagaccctccctcagggaccacgcgccctgaccctcattgcctcaccatattataaaacactaaaaccgcttaagttcttccccacagagttggggaactaattgtaaacagaatacacgtctacatatcagccctgagacagctggccccgctgcacacgcagcctgctggccccagcaagacacggtcagagctggtaagtgctctacagcattcagaaatctgaccacagcgtacacacagctcacaagtcagtgcaaacagaagctaatgacatcctccaagaaaattccatacagttatgacaatggaaaacctgttatacattgtaacgatacatcattagcaatgtttaatacatcttactataaacactgaatttctaagtacatgatactcctagcagcttaatccagaaaacaacgatgtgaatccctccaatactgtaaacacaagaccaagtgctgcccatgagagtgccccgtgccacccgcgggcaccaccggcctctgaggacccctgagccacacactgctgctgcttcagggaagcatccatgtcacaggacttccccaggggcctgatttctgccacagctgcaccaactacccagagatatgctgtccgcccacagatccagacgctcccatgccatggttgctggggacgggcgctgcacacacggctgctgtgggggggggcggggggcgggggcgcagtgattattttgacagcaactctgaagaaacaggtgctgactctcgcgtggggttcctctcaccagaacgaccacacacaggaggagggatgcctgggcccaccacttctctcctctgaagggaaaaattcagaccgccagatgggaaatggctgaaatcaccgcacttctattgggtggaagggttcaaacatcggggactcaggtactcagattcccttgccgcctccctctgaaacacgaaccttcctttatgagctggcttcagggaggccccctggcttctcttaccccaacacacagtgctcccacagccacagtgctgcagaggccacctcggccctaaagtcccatggctggaagccacagcaggctccacagaggccccacacaacctcgtctgcacccatcagtctgaagaggttaaaattcaactccatattcagccctatgtttattccttctaaatgccctttttcctttccagataactgtcactaagggaaactgtctgggttccaaactctgctcagcatcctcacagggagaaggcacccccaccacaagggaagctccggagccctcctccctgtcgcctgtgcacagacatagcccactacgggggcagccacggcacctgtcaggggaagctgctctacacccccctttttttggggggggttggcttctcacaacccatcaaattatatatgtatatatatg

SEQ ID NO: 10144 - DNA, 1226 bp, Homo sapiens
agccgcaggccttcctgggcctgcgccagatccgcctgctcaacctctccaacaacctgctctccacgttggaggagagcaccttccactcggtgaacacgctagagacgctgcgcgtggacgggaacccgctggcctgcgactgtcgcctgctgtggatcgtgcagcgtcgcaagaccctcaacttcgacgggcggctgccggcctgcgccaccccggccgaggtgcgcggcgacgcgctgcgaaacctgccggactccgtgctgttcgagtacttcgtgtgccgcaaacccaagatccgggagcggcggctgcagcgcgtcacggccaccgcgggcgaagacgtccgcttcctctgccgcgccgagggcgagccggcgcccaccgtggcctgggtgaccccccagcaccggccggtgacggccaccagcgcgggccgggcgcgcgtgctccccggggggacgctggagatccaggacgcgcggccgcaggacagcggcacctacacgtgcgtggccagcaacgcgggcggcaacgacacctacttcgccacgctgaccgtgcgccccgagccggccgccaaccggaccccgggcgaggcccacaacgagacgctggcggccctgcgcgcgccgctcgacctcaccaccatcctggtgtccaccgccatgggctgcatcaccttcctgggcgtggtcctcttctgcttcgtgctgctgttcgtgtggagccgcggccgcgggcagcacaaaaacaacttctcggtggagtactccttccgcaaggtggatgggccggccgccgcggcgggccagggaggcgcgcgcaagttcaacatgaagatgatctgaggggtccccagggcggaccctcccctcccctcccccgcgggccggccgctcgcgtgtccacctatgcatttcccggaggggaaggggacggctgcacggcgctccccaggcagaacttcccctttttttgtagacgcccaaccgcaggactgtttttcatcagcatgcgtcttttttgcagtttctcaagcgttttctaaagatttcaacccgtcttcctgtccctgctatggtggctgagctggggggtgggggtgcgggctgcaaggatggggggatgggctcccgtctaccaacccggggtggctgggggcgctcagagaccccaggatcctcagggcccgcaattcacacccaggaggcacaagactgctg

SEQ ID NO: 10145 - DNA, 1692 bp, Homo sapiens
ggctccaggaacactcggaggtgtctggcttccttctggagtgtgacagctcggtgcagggcgcgctgcagaagcacctcgcgctatacaggatccggcggaaggtcacggtggagccgcacccggagctgcgagtgtgggcggtgttgcccagttcccctgaggcctgcggggctgcatcgctgcaggagagggcaggggctgccgccatcctcatccgcgacccgcgaacagcacgcatggggtggcggctcctcacccaggatgaaggcccagccctggtgcccgggggccggctcggggacttgtgggattatcaccagcaccgatacctgcaaggtatgggtggggtgggcacgctgggctggattgcacgggtggagctggacgatgttcaattctcgctggtttcccccctccaatccctgcaggcgttcctgagggggtccgagacttgcctcctggggtggccctgcccctggagtccaacctggccttcatgaacggcgtgagcttcaccaaaggctgctacattggccaggagctgacggcccgcacccaccacatgggcgtcatccgcaagcgcctcttccctgtccggttcttggacccccttcccaccagtggcatcacccctggtgccacggtgctgactgcctcaggacagactgtgggcaagttcagggctggccagggcaacgtggggctggccctgctgtggtcagagaagatcaagggtcctctgcacatcagagcctctgagggtgcccaggtggccttagccgcatctgtgccagactggtggcctacagtctccaagtagtccgaagccttggctggcgcaggctgatggggaggctggggcctggggcctttggcctctgtccagggtcttcccgtcccatctgtctgctgcgcctactgggtgggagccctggtttccatctgggaaagtcccccttgtaggtgccctgcctggccccacccatgctcaggggccccaggcacgtgggttgttttctccctggacttcctgtggccccagaggagcccaccgtgtgagtgctgggctccagatggcgccgggtcccaatcgtggctccacacagggttgtctgggaggacgggacggtgtctctggccagcactggcagcttccgggccttgtaccccactctgcctggcatgagcctcatggggggttggtccctgtgcctggaagcggggtggtgtccagggtctgcaggctggggctcgggctttgggagttgtttcactgtgcttgcttccagcatgtctcagggtggggctatgcgtggtctagaggggtctggggcattggatcaggtggcatgtgggtgtctacacatcgagaagcacacagggatgagccactaggtatcccatgctggaggcttgtggaaggctgtgcccatctcccatgtttccccacctctgttcctcctcagagccctccaggagcgtggggtgggggccagcgcagggctcaggagccagcagggcagagttctgcctgtgtgtgctgggttttggcatagcctgtgtttgcagtgagagtgacttgctgtcagtcacggggcacagcctcctgttcacccactggcttcccccttcccactgaagtgtgagctctatgtttcagggcatctattaaagagtgagccacaggca

SEQ ID NO: 10146 - DNA, 620 bp, Homo sapiens
cctgtctgctttagtttgtgttgtaaaaacataggaagttcgtgtgtgtgtgtgtgtgtgtgaattcaaggcataaggtgcagttgtgttatgtgggtatagtgcatggtggtgcagtctgggcttcttaccctcacacctcctgcctcccctcgttagagtcccccacatccgccttccactttctgagcccacattgcctgttgggcagctcctggttatgaggcaggacgtgtggtgtttgactgtctgtttctgagctgttttacttaacacagtgtatatggtgcatctttaggaaagcatgcttgtattttcctttcaaagccagatatgggcgggtgtggtggctcatgcctgtgatcccagcactttgggaggccgaggcaggaggattgcttgagcccaggagtttgagagcagcctgggcaacatatcaagactctgtctcttaaaaaaaaaaaaattagccaggcatggtggtccacacctgtggtcccacctattcgggaggctgaagtgcgaggatcacttgagcccaggaggttgaggctgcagtgagctgtgattgtgccactgcactccagcctgggcaacagagcaagaccctgtcttaaaac

SEQ ID NO: 10147 - DNA, 8170 bp, Homo sapiens
gtaaagcctaagcatcatgttttgatgtctcggaaggaatcatggaaggtagggcttccaaggcaggactcccacccccaggaagagtgcagcctattataatgtatgcaaaccaacctggctgtagagctgctcactccacagtgcctggaatctctccattaggttcagcattgccttctcctttccttgctttgggaagagcactggatgaaacaacagatatgaaaatatattttaaactcctaaaactcttaccattgaaagttatagtcacctacagtaattgagaatggctatgggccaggcgtggtggctcacgcctctaatcccagcactttggaggccaaggcgagaggatcgcttgagggcaggagtttgagaccagcctgggtgagaccttgtctctacaaaaacaaaacaaaacaaaaaaaagaatagctaaggcaggaccagaatacatctcctgcctgaatcttaaggaagtgtttccttatgttgagagaagtctgcttcctttgccataaagtaagtgaaatccctctttcatctgaagaatttcaaaaatttctgtgaaatgctcctccctcctgaactttagtctttctacagccaaaaggtgggctgagcattgctgatcccaaaagttaaatacagatgtttccttgccaccccctctgcagcccgcctctgtccagccaggctcttgtctgacgtcctcagaggactggacaagcatttgaagtcagaaatagaaattccaaggtttccatcatcttcctccttgtctgttacctcctcttaaggatctgccccatcatttcccatcagccagccagggaggggcagaatcctctctcctttacagagccccatgcccaggactctgcagagctcttacgtgtatgctatcccataatcctcacagtagatgaagcaacagactcagagaggtgaactgacttgttaaaagttagtgtgggtcctaggggacccctcacacctcctcccatcaaaggttctgactaacctttgagctaaatgagttaaataaacacagatgccagtggccaaatgagaaacaaatcaatgctttgttaatgtaggcaaacaccctctattctggactgaagaacgtgacttagtcctgagtcagactggggatgcctgcatgtcctcattgtgcatacagagatggggctagaaatgcagattagacccctggggttacatggacaaaggctgcagtccctcccctcacacctaggcatggacagacaggaggaaaatggagaacctgccagagcaggcctgtaaccaagaagctgtgtgagccctttgatgtgaggacacaaatggaagataaaatagcctggtctcattgatgagcagtaatccagcccacgactgaagcagggcccagtgactcaacctctggccagttaggttacccattcctcccttgggagggggcggggaaagtagcggtgggatagagaaagagcatttcctctagcacatctctctcacagagccatgagagggaaggggaactgtcccttcccgccagctgccaagtgatggcgcttggtgttttagatgctgaggtgcggtgctgtgtccgtgccctgtgccttgtggcatggattcagacaaagactctgggtccctcagagtctaaacactgaggttccacatattttccaaaaggaaatacatttttttaaagtaacatattttataaaagtcatccttcgccctccttagtccattaggtacatttgcacacaccatttcattgggtggaactctgtgagacaggcacaaggaggaaataggtgctcaaaggatagacctgtattctagcccacatttttctaactacagtgcttgcaatctttccactacacaacttacatctctcagtaaaagtacagatataagtgaaccaaatacctctgacaaagagtgaaaacaatccactatgtaaagggggagaaagaaaggactaaacccagctgagggcacatggacacctcctggcagctgaggctgaggaggagagggagaatggtcacaggcttttactaattaagggaattattttcttggtcctgaatctttcagagagatctatctttaggatctttatataaggtatagggaacagcatcctgaaaggggcctggtgctgtcatcttccagaaaatacaggaccattccccaacaccctctcctcggagtccctggggaaagccataggcaccatgttcaaccctcatctgaagaatgagactactgagggccagagtacgtatggtcagggatgcagcatgaagcctggagcccaggactggaattacatcgtccaggcactaccgccaaatcactctgggacttggacaggtcattttacctctctaagcccctgtttcctcatctataaaattggggataattattcattgggtagtttcaaggtagaaataaaacaacttacatcatgcatggggcacatcatagatgcccaacaagtatgatttccctttccacccccgcctcagtccgtacccagcactccggctgctatacaagtggccttaggctagtgaggcccaggaggagagaatcctaattaggaagcaaattcattctggcccttctccatgacaggtgaaaagcgaaatcccaaaggtgccgaagcagcctctggtgctccatcacccgcgcatgacgacaaccaagtctccctcaaaggatatgctagagccagaggcagagctggctgaagatctgcccactaccaaaagcacttctgtggagtcagagatgcccactgagaacctggaaggccattccccgtcttgccggaccttcgtgccactgcctcccatctgctccaactccactgtgcatagtgaagagaccctgtcccacctgagtgacacaactgtccgcctcagcccagagcgcccatcagatgaggactccaagagcacagagtccatcttcctgacccaggtacctgtatccagctgcccctgcccacttgttgctagctcccacaggttcctgtgcagcccttaggctcgattgctgtggacagctgggagcaacaagcacatggcaggtctggaaacaagaagtcagcacccttggtggagcttgcaagcctcttctgggagatctctggtctgaggacactgatagggatacctgatagggacacccatggggataagtcatggttctgtggcacagtcaagatctggggtctgactggggtgtgattccaactagtttttcagaggggtttgctgctgcctgtacctctctgcttcaggtctcctcacttttgatgctgcctctggatcctgggaacatagatcagatgcaggtcgtgcccttaaggtgctctcagtataatggggaacatagacaggaacagcttatgcaatcagtgctgagactgagggaatcccagaggctgggagtctggaggaaggagagatgcctctgccccagcccaggagggcttcctggaagaggctcaactgagctgagatttacaggctgagtaggaattaaaaaggtgaagatatagcagcaagggcattctggacagaggaaacagcatgaaacaggatagaggaaggaaattaaaatggtacatgcagaaaccacaaatgtttagtgtcagtgcagcagaagggtggcatgtggcaaagggtaatataaggctagaagagttggcagggcccccttgaactttattactgtaccatccctctccctgatctccctgcctctagtcttgcccctccagtctgctcactgccagatctttccaggatgtacatctatccattcatggaggtctaactctccatctatttctttttccacagatgacttatagtgacatataaatttatacagtataaaagtatcttaaagaaatatctcagaacctttttggagcaatgcagaatataaataagcattttaaaagaaacaatttgagagagttagatgaaaagaaaatacggacaggaaaggaaatagtacaagggtaattctgtcactcaaacatgcacatcatgcactgctgctattataataaaggtgttttgacaaaatgcagttctgagctcctagcggccaaagcaatacaatcaattatgagtcaccatgttttcagaaaaaaaaaaaaaaatctttttttttctggcctaattgtcctggctataacctttaatacaatgatgaacagaagtggtgagagcagacttccttgtcttgtgcctgttcttaaggggaaagcattcagtctttcaccattaattatgatattaggtgagggttttccatagatgatctttatctggttgaggaagttactttctattcctagtttgagtgttttttaatcatgacagagtgggcttttcctatgtctactgagatgatcatatggttttgatatattatattaattgatttccagatgttaaaccaacctttcattcctaggataaatctcacttggtcatagtatataatcccttttacttgttgaattcagtttgctaatattttttgagaatgtttgcatttatattcataagtgatactgctttgtatttttcctttcttgtgatgtctttctctagtttggatttcagggtaatactaacctcagagaataagcctcttttaatttttggaagagtttgtgaagtattggtgttaattcttttttaaatgtttggtagcattcaccagtgaaaccatctggtccttggcttttctttgtgggaagtttaaaaattgctaattcagcttttttgcttgttataggtcatatatatgtacacacatacgtgtgtatatataatatatattcacaaatacacacacgtatatacatggtggggtctcactatgttgcccaggctgtagtgcaatggctgttcacaggcaccatcccactactgatcaggatgcgagttttgacctgctccattttctacctaggcaagttcatctctccttaggcaacctggtggtctcccactcctgggaggtcaccatattgatgccaaacatactgtggacactcgaggagcataatgcactacagcctagagctcccgagctcaagcagtcctcccatctcagcctcctgagtagctaggactacaggcatgtgccaccccacctggtgagtaattttaataaataaatacatccctacatgacatacagatttcttataaagccattaggataggctaaaatcctccatggtttgccatcagagtgagcataaagaaaatacaaaataaaacgcaccctcagcttggcatataatggtccttaccgatccgggtcctgcttaccactgcagttgcctatctcttcactttgtacttaactgtaccaatctttagttccccgaaaatgcaccttgatgtttcttacctctgcgcctttgctcgtgctgttccttgtctgaaacaatcattctttctcatcacttgcagtccacacctctccccattgctccgtagggatggctctcctggctcttcaagacttagctcaggctaaggcattcctccaagggagcttcttggctaggttggggcttcctctgggatcacccaaaaccactgtattccctctgttaaagcatttatcaattgtctatttttatatctgctttcttccatcccagtcttggtcttacccttgcccttaacagggcccagcagagaccagcacagagatgatactccgaatgttcatggaatgaatgaatgaatgagtgacaaatgaatgcgttttcttcctgggcacaggtgagtgaactgccttcctccgtcatccataaggatgatttagagttaaaggagaaagaccaaaagaaaccaccaacggcacccagagaggtgaaagggactcggaggaaactcccaactgccttccttcccagcaagtaccacggctatgaagaactgctgacagccaagcctgatccagccttcattgagccaaagggtatgtgagggcatatccttgctctagggcaagaggccatctccacagctcagagcaagtcagggtcaagccaaggctggcaccaagctgtcttttcccaactagggtgctgtcctctgtctaaatacctgtcaaagggctccttttagggtgtcctttgtttgaagccccacatattgggacccctgtcctggcctaggccttcactggcttatggggagccacagtttattcagagattctagttggtctcagcctagctgctctggatgataaagtctctcctcaggaaaagtgtgatgaatgaacacccagaatggccagattcttgagcttttcccagcccaggttaagttcccaaactgaacgtccaaaatcgttcctatctggttggaggcaaaggaggcagcttcatctctgtgttaatcagtacttccaaagcaactggcattcagctgggctgttctgggtgttagcccctgcgatataaccccctgaggttaatggggtcacattggagccagccttttcccccactccaatactatttacccattacaatctgtgctatttttccattataatatgggacaaatactcactgaagaatgatggaacttcaggcactggaacagatccggaagaaacctgggggcagtgttttcttttggggactctcaaatccttttacctagagctgctgtgagactgaggaatgaagcaatcaggggaggcatctgggaggaggagggggaagtgccttgactcagtcttgccttcttgccctaggaatccagaagaatgcacaagccctgcaacaaatgctgaagcacccactcctgtgccactcctccaagcccaagctggacactcttcagaaaccctatgttcacaaagagaaacgggtaaacatccagctcactgaatgtgtaaatggcccctgagtaccgcccacaattacagatgtggctgtcaccttgggaccctctgagggccatgctttcccagcacccccagatgccccccagcctgttgctgtgactgtatgaagttaggccagggaagtctgtgcataaacctgggataacaccctcctccatgaccttctgccaggcccagagaatcccgattccacccccaaagaagactagagcccaacttctggatgacatcttcattcgcttgcgggatccccggaacattacagaggctccactaggtacggctctgccacagctgccaggatcccagatccagttcacgcctgctggctaaaggcaaagaaagggcttgtgtcagtgcaggaaaggcccttagagagcaactgcctacatcagtctctacatgtagatggacaaaaggagagccagcgtgaggcagggagttgcctaaaatcacacagcatgttaaggtcctgaaccagggcttaagatagagtcaatgcataggggcagtaggaagtcagtgacttcccaagctggaaaggccatttttagccccttagcatcctcctgccacaccatcccattttccaagggtctctggacccaatcctcttgcttctggctaggtgagaaccaggatgagcttggtgcctctcctggcttcttttcctgcaggtgctgtcctgcaccagtggacagaacggcggctggtgaaccacaagcagtacctggaggccaagaggctgttgaaggagttccaggcacgttaccggcagctggtgagtggctctctgcgcacagtgttcgggactaccccgctccccatggcctgcccagcgctgagtgagagccagcccaagttcggccacttcctcgagttcatggatgagttctgccaggagcccacagccagtgactcacaaggctagagctgtgcatgggggctgtgtgcaccacccggcctgtgccccagctctccccgagggctctgtgccctggaccgcacctcaaggttgaccagccggccacaggcctcagagctcagctgggccccacttgctggccacaaggtggcatccccttgtcaggatctcccctccttggcccaggcatgacctggtgcctggcccagcggcaataaagagtgggtgcacagggcaata

SEQ ID NO: 10148 - DNA, 9993 bp, Homo sapiens
  SITE (6635): n equals a,t,g, or c
aactgaagtgccctccctcttccagcccttggacttcagtaccttcattgggtcctacatctgacccaatacctttcagtgtgtccaggggtctgatcggccactgcctgactcctgaccccttcgatcctgatgtccctgatactcttccattgcaaataaatactctcgccaagatggtccagcttttccaggcagtctgctcaacaaagcttgtatattttttgcccttcagaggctggcttggccaataagccaccgattgcaggctggcttcacagggcattctctgtgtcccagacagccatgaggtctctcttaacactggctctacttatcccttagatgtgtgggtcctcctttccccctgtccatccccaaataagtgcccaggactggcctcagtgaaagagccatcagaagtgtgtagaggtttgtgctgaggaagatgaagtgtcaaattgtatcctgaagttaaagtcaatgccctgccaaccttccagaatctttatgagataaagagtttgttcgtacgaaaaatgtgtttgttcttattattttgccaccagcttccctagtatttgatgtaggctacatatccagcatggaaaaaagaggaaaaactcttagctcttaaacacgcaacagtgatggtggaatttcagacaggaggggcaaggtactctgtgcatgagtaggtattattacagggtcaaggcatcacccagcagtgagtcccatccacagcagcatgtcttacccaataccacccccaatcctagcaagcatgtagccctgcagtgaggggcctagacatacctgggtagaggtgaggggtggtgtcaacctgagagtctctcctgcattcattacagatcgcaaaagaggatgctgtcctaccagtagctctcttcccatctctctgcgagttcgtctttcataacaaccctctggtggcccatacacgaggtatagtgcccgcaaacctgccccctctcaacccagtgcccaaggagcagtgtggcaccctcatccccacctcatcaatgccaagccctgggatctactctgtgtcggggtggacaaggttcatggtacattgaggaatggaggaaatagctctgtaccagcgcttcctgacagtaaccctgtgagcaggcattattgtccccacggacagtggtagaaactgaggctcagggaggttcatgatctgcccaaggtcacacagcaagaaagagtctgagttgggaatggaatatggaattctttaaatcctgtatgagctcttttgaaccacaccctgctttgtggaacagttctgtcatgacctcatttcccaattcccagttgcagaggggtgcagccccaactgcaggagcctctcttcccagagcacactgaatggagtggtcagcagtggagccactgtgtaagatacaggagttggaggcattttagagtcctgggccctggagtgacaccagtgaagttctgatcatcactccacactatctttattatcttggacaaattccttagcctctctgtgcctcagtttccttgcctattgaatgggaataatggtaggaggtaggaattctcctaggaggtaggaattctcgacctacctcctagggttgagaataagtttcagtaatacatgtaaagcaatttgaatagtgcctggcacatagtaagccccagtataaattttagctaatagtaatcttattttcccatcatggcaccaggggtccctccactgctgaagagcttcctccaggagcgactgggaatccacttaattcgaaggaagatagtaaagcctaagcatcatgttttgatgtctcggaaggaatcatggaaggtagggcttccaaggcaggactcccacccccaggaagagtgcagcctattataatgtatgcaaaccaacctggctgtagagctgctcactccacagtgcctggaatctctccattaggttcagcattgccttctcctttccttgctttgggaagagcactggatgaaacaacagatatgaaaatatattttaaactcctaaaactcttaccattgaaagttatagtcacctacagtaattgagaatggctatgggccaggcgtggtggctcacgcctctaatcccagcactttggaggccaaggcgagaggatcgcttgagggcaggagtttgagaccagcctgggtgagaccttgtctctacaaaaacaaaacaaaacaaaaaaaagaatagctaaggcaggaccagaatacatctcctgcctgaatcttaaggaagtgtttccttatgttgagagaagtctgcttcctttgccataaagtaagtgaaatccctctttcatctgaagaatttcaaaaatttctgtgaaatgctcctccctcctgaactttagtctttctacagccaaaaggtgggctgagcattgctgatcccaaaagttaaatacagatgtttccttgccaccccctctgcagcccgcctctgtccagccaggctcttgtctgacgtcctcagaggactggacaagcatttgaagtcagaaatagaaattccaaggtttccatcatcttcctccttgtctgttacctcctcttaaggatctgccccatcatttcccatcagccagccagggaggggcagaatcctctctcctttacagagccccatgcccaggactctgcagagctcttacgtgtatgctatcccataatcctcacagtagatgaagcaacagactcagagaggtgaactgacttgttaaaagttagtgtgggtcctaggggacccctcacacctcctcccatcaaaggttctgactaacctttgagctaaatgagttaaataaacacagatgccagtggccaaatgagaaacaaatcaatgctttgttaatgtaggcaaacaccctctattctggactgaagaacgtgacttagtcctgagtcagactggggatgcctgcatgtcctcattgtgcatacagagatggggctagaaatgcagattagacccctggggttacatggacaaaggctgcagtccctcccctcacacctaggcatggacagacaggaggaaaatggagaacctgccagagcaggcctgtaaccaagaagctgtgtgagccctttgatgtgaggacacaaatggaagataaaatagcctggtctcattgatgagcagtaatccagcccacgactgaagcagggcccagtgactcaacctctggccagttaggttacccattcctcccttgggagggggcggggaaagtagcggtgggatagagaaagagcatttcctctagcacatctctctcacagagccatgagagggaaggggaactgtcccttcccgccagctgccaagtgatggcgcttggtgttttagatgctgaggtgcggtgctgtgtccgtgccctgtgccttgtggcatggattcagacaaagactctgggtccctcagagtctaaacactgaggttccacatattttccaaaaggaaatacatttttttaaagtaacatattttataaaagtcatccttcgccctccttagtccattaggtacatttgcacacaccatttcattgggtggaactctgtgagacaggcacaaggaggaaataggtgctcaaaggatagacctgtattctagcccacatttttctaactacagtgcttgcaatctttccactacacaacttacatctctcagtaaaagtacagatataagtgaaccaaatacctctgacaaagagtgaaaacaatccactatgtaaagggggagaaagaaaggactaaacccagctgagggcacatggacacctcctggcagctgaggctgaggaggagagggagaatggtcacaggcttttactaattaagggaattattttcttggtcctgaatctttcagagagatctatctttaggatctttatataaggtatagggaacagcatcctgaaaggggcctggtgctgtcatcttccagaaaatacaggaccattccccaacaccctctcctcggagtccctggggaaagccataggcaccatgttcaaccctcatctgaagaatgagactactgagggccagagtacgtatggtcagggatgcagcatgaagcctggagcccaggactggaattacatcgtccaggcactaccgccaaatcactctgggacttggacaggtcattttacctctctaagcccctgtttcctcatctataaaattggggataattattcattgggtagtttcaaggtagaaataaaacaacttacatcatgcatggggcacatcatagatgcccaacaagtatgatttccctttccacccccgcctcagtccgtacccagcactccggctgctatacaagtggccttaggctagtgaggcccaggaggagagaatcctaattaggaagcaaattcattctggcccttctccatgacaggtgaaaagcgaaatcccaaaggtgccgaagcagcctctggtgctccatcacccgcgcatgacgacaaccaagtctccctcaaaggatatgctagagccagaggcagagctggctgaagatctgcccactaccaaaagcacttctgtggagtcagagatgcccactgagaacctggaaggccattccccgtcttgccggaccttcgtgccactgcctcccatctgctccaactccactgtgcatagtgaagagaccctgtcccacctgagtgacacaactgtccgcctcagcccagagcgcccatcagatgaggactccaagagcacagagtccatcttcctgacccaggtacctgtatccagctgcccctgcccacttgttgctagctcccacaggttcctgtgcagcccttaggctcgattgctgtggacagctgggagcaacaagcacatggcaggtctggaaacaagaagtcagcacccttggtggagcttgcaagcctcttctgggagatctctggtctgaggacactgatagggatacctgatagggacacccatggggataagtcatggttctgtggcacagtcaagatctggggtctgactggggtgtgattccaactagtttttcagaggggtttgctgctgcctgtacctctctgcttcaggtctcctcacttttgatgctgcctctggatcctgggaacatagatcagatgcaggtcgtgcccttaaggtgctctcagtataatggggaacatagacaggaacagcttatgcaatcagtgctgagactgagggaatcccagaggctgggagtctggaggaaggagagatgcctctgccccagcccaggagggcttcctggaagaggctcaactgagctgagatttacaggctgagtaggaattaaaaaggtgaagatatagcagcaagggcattctggacagaggaaacagcatgaaacaggatagaggaaggaaattaaaatggtacatgcagaaaccacaaatgtttagtgtcagtgcagcagaagggtggcatgtggcaaagggtaatataaggctagaagagttggcagggcccccttgaactttattactgtaccatccctctccctgatctccctgcctctagtcttgcccctccagtctgctcactgccagatctttccaggatgtacatctatccattcatggaggtctaactctccatctatttctttttccacagatgacttatagtgacatataaatttatacagtataaaagtatcttaaagaaatatctcagaacctttttggagcaatgcagaatataaataagcattttaaaagaaacaatttgagagagttagatgaaaagaaaatacggacaggaaaggaaatagtacaagggtaattctgtcactcaaacatgcacatcatgcactgctgctattataataaaggtgttttgacaaaatgcagttctgagctcctagcggccaaagcaatacaatcaattatgagtcaccatgttttcagaaaaaaaaaaaaaaatctttttttttctggcctaattgtcctggctataacctttaatacaatgatgaacagaagtggtgagagcagacttccttgtcttgtgcctgttcttaaggggaaagcattcagtctttcaccattaattatgatattaggtgagggttttccatagatgatctttatctggttgaggaagttactttctattcctagtttgagtgttttttaatcatgacagagtgggcttttcctatgtctactgagatgatcatatggtttggatatattatattaatggattcccagatgttaaaccaacctttcattcctaggataaatctcactgggcaaagaatataaccccttttactggtggaatccagtttgctaatattttttgagaatgttggcatttatattcataagtgatactgctttgtattttccctttcttgtgatgtctttctctagtttggatttcagggtaatcctaacctcagagaataagcctcttttaatttttggaagagtttgtgaagtattggtgttaattcttttttaaatgtttggtagcattcaccagtgaaacccatctggtccttggcttttctntgtgggaagtttaaaaattgctaattcagcttttttgcttgttataggtcatatatatgtacacacatacgtgtgtatatataatatatattcacaaatacacacacgtatatacatggtggggtctcactatgttgcccaggctgtagtgcaatggctgttcacaggcaccatcccactactgatcaggatgcgagttttgacctgctccattttctacctaggcaagttcatctctccttaggcaacctggtggtctcccactcctgggaggtcaccatattgatgccaaacatactgtggacactcgaggagcataatgcactacagcctagagctcccgagctcaagcagtcctcccatctcagcctcctgagtagctaggactacaggcatgtgccaccccacctggtgagtaattttaataaataaatacatccctacatgacatacagatttcttataaagccattaggataggctaaaatcctccatggtttgccatcagagtgagcataaagaaaatacaaaataaaacgcaccctcagcttggcatataatggtccttaccgatccgggtcctgcttaccactgcagttgcctatctcttcactttgtacttaactgtaccaatctttagttccccgaaaatgcaccttgatgtttcttacctctgcgcctttgctcgtgctgttccttgtctgaaacaatcattctttctcatcacttgcagtccacacctctccccattgctccgtagggatggctctcctggctcttcaagacttagctcaggctaaggcattcctccaagggagcttcttggctaggttggggcttcctctgggatcacccaaaaccactgtattccctctgttaaagcatttatcaattgtctatttttatatctgctttcttccatcccagtcttggtcttacccttgcccttaacagggcccagcagagaccagcacagagatgatactccgaatgttcatggaatgaatgaatgaatgagtgacaaatgaatgcgttttcttcctgggcacaggtgagtgaactgccttcctccgtcatccataaggatgatttagagttaaaggagaaagaccaaaagaaaccaccaacggcacccagagaggtgaaagggactcggaggaaactcccaactgccttccttcccagcaagtaccacggctatgaagaactgctgacagccaagcctgatccagccttcattgagccaaagggtatgtgagggcatatccttgctctagggcaagaggccatctccacagctcagagcaagtcagggtcaagccaaggctggcaccaagctgtcttttcccaactagggtgctgtcctctgtctaaatacctgtcaaagggctccttttagggtgtcctttgtttgaagccccacatattgggacccctgtcctggcctaggccttcactggcttatggggagccacagtttattcagagattctagttggtctcagcctagctgctctggatgataaagtctctcctcaggaaaagtgtgatgaatgaacacccagaatggccagattcttgagcttttcccagcccaggttaagttcccaaactgaacgtccaaaatcgttcctatctggttggaggcaaaggaggcagcttcatctctgtgttaatcagtacttccaaagcaactggcattcagctgggctgttctgggtgttagcccctgcgatataaccccctgaggttaatggggtcacattggagccagccttttcccccactccaatactatttacccattacaatctgtgctatttttccattataatatgggacaaatactcactgaagaatgatggaacttcaggcactggaacagatccggaagaaacctgggggcagtgttttcttttggggactctcaaatccttttacctagagctgctgtgagactgaggaatgaagcaatcaggggaggcatctgggaggaggagggggaagtgccttgactcagtcttgccttcttgccctaggaatccagaagaatgcacaagccctgcaacaaatgctgaagcacccactcctgtgccactcctccaagcccaagctggacactcttcagaaaccctatgttcacaaagagaaacgggtaaacatccagctcactgaatgtgtaaatggcccctgagtaccgcccacaattacagatgtggctgtcaccttgggaccctctgagggccatgctttcccagcacccccagatgccccccagcctgttgctgtgactgtatgaagttaggccagggaagtctgtgcataaacctgggataacaccctcctccatgaccttctgccaggcccagagaatcccgattccacccccaaagaagactagagcccaacttctggatgacatcttcattcgcttgcgggatccccggaacattacagaggctccactaggtacggctctgccacagctgccaggatcccagatccagttcacgcctgctggctaaaggcaaagaaagggcttgtgtcagtgcaggaaaggcccttagagagcaactgcctacatcagtctctacatgtagatggacaaaaggagagccagcgtgaggcagggagttgcctaaaatcacacagcatgttaaggtcctgaaccagggcttaagatagagtcaatgcataggggcagtaggaagtcagtgacttcccaagctggaaaggccatttttagccccttagcatcctcctgccacaccatcccattttccaagggtctctggacccaatcctcttgcttctggctaggtgagaaccaggatgagcttggtgcctctcctggcttcttttcctgcaggtgctgtcctgcaccagtggacagaacggcggctggtgaaccacaagcagtacctggaggccaagaggctgttgaaggagttccaggcacgttaccggcagctggtgagtggctctctgcgcacaggggtcgggactaccccgcttcccatggcctgcccagcgctgagtgagagccagcccaagttcggccacttcctcgagttcatggatgagttctgccaggagcccacagccagtgactcacaaggctagagctgtgcatgggggctgtgtgcaccacccgggcctgtgccccagctctccccgagggctctgtgccctggaccgcacctcaaggttgaccagccggccacaggcctcagagctcagctgggccccacttgctggccacaaggtggcatccccttgtcaggatctcccctccttggcccaggcatgacctggtgcctggcccagcggcaataaagagtgggtgcacagggcaata

SEQ ID NO: 10149 - DNA, 8170 bp, Homo sapiens
gtaaagcctaagcatcatgttttgatgtctcggaaggaatcatggaaggtagggcttccaaggcaggactcccacccccaggaagagtgcagcctattataatgtatgcaaactaacctggctgtagagctgctcactccacagtgcctggaatctctccattaggttcagcattgccttctcctttccttgctttgggaagagcactggatgaaacaacagatatgaaaatatattttaaactcctaaaactcttaccattgaaagttatagtcacctacagtaattgagaatggctatgggccaggcgtggtggctcacgcctctaatcccagcactttggaggccaaggcgagaggatcgcttgagggcaggagtttgagaccagcctgggtgagaccttgtctctacaaaaacaaaacaaaacaaaaaaaagaatagctaaggcagaccagaatacatctcctgcctgaatcttaaggaagtgtttccttatgttgagagaagtctgcttcctttgccataaagtaagtgaaatccctctttcatctgaagaatttcaaaaatttctgtgaaatgctcctccctcctgaactttagtctttctacagccaaaaggtgggctgagcattgctgatcccaaaagttaaatacagatgtttccttgccaccccctctgcagcccgcctctgtccagccaggctcttgtctgacgtcctcagaggactggacaagcatttgaagtcagaaatagaaattccaaggtttccatcatcttcctccttgtctgttacctcctcttaaggatctgccccatcatttcccatcagccagccagggaggggcagaatcctctctcctttacagagccccatgcccaggactctgcagagctcttacgtgtatgctatcccataatcctcacagtagatgaagcaacagactcagagaggtgaactgacttgttaaaagttagtgtgggtcctaggggacccctcacacctcctcccatcaaaggttctgactaacctttgagctaaatgagttaaataaacacagatgccagtggccaaatgagaaacaaatcaatgctttgttaatgtaggcaaacaccctctattctggactgaagaacgtgacttagtcctgagtcagactggggatgcctgcatgtcctcattgtgcatacagagatggggctagaaatgcagattagacccctggggttacatggacaaaggctgcagtccctcccctcacacctaggcatggacagacaggaggaaaatggagaacctgccagagcaggcctgtaaccaagaagctgtgtgagccctttgatgtgaggacacaaatggaagataaaatagcctggtctcattgatgagcagtaatccagcccacgactgaagcagggcccagtgactcaacctctggccagttaggttacccattcctcccttgggagggggcggggaaagtagcggtgggatagagaaagagcatttcctctagcacatctctctcacagagccatgagagggaaggggaactgccccttcccgccagctgccaagtgatggcgcttggtgttttagatgctgaggtgcggtgctgtgtccgtgccctgtgccttgtggcatggattcagacaaagactctgggtccctcagagtctaaacactgaggttccacatattttccaaaaggaaatacatttttttaaagtaacatattttataaaagtcatccttcgccctccttagtccattaggtacatttgcacacaccatttcattgggtggaactctgtgagacaggcacaaggaggaaataggtgctcaaaggatagacctgtattccagcccacatttttctaactacagtgcttgcaatctttccactacacaacttacatctctcagtaaaagtacagatataagtgaaccaaatacctctgacaaagagtgaaaacaatccactatgtaaagggggagaaagaaaggactaaacccagctgagggcacatggacacctcctggcagctgaggctgaggaggagagggagaatggtcacaggcttttactaattaagggaattattttcttggtcctgaatctttcagagagatctatctttaggatctttatataaggtatagggaacagcatcctgaaaggggcctggtgctgtcatcttccagaaaatacaggaccattccccaacaccctctcctcggagtccctggggaaagccataggcaccatgttcaaccctcatctgaagaatgagactactgagggccagagtacgtatggtcagggatgcagcatgaagcctggagcccaggactggaattacatcgtccaggcactaccgccaaatcactctgggacttggacaggtcattttacctctctaagcccctgtttcctcatctataaaattggggataattattcattgggtagtttcaaggtagaaataaaacaacttacatcatgcatggggcacatcatagatgcccaacaagtatgatttccctttccacccccacctcagtccgtacccagcactccggctgctatacaagtggccttaggctagtgaggcccaggaggagagaatcctaattaggaagcaaattcattctggcccttctccatgacaggtgaaaagcgaaatcccaaaggtgccgaagcagcctctggtgctccatcacccgcgcatgacgacaaccaagtctccctcaaaggatatgctagagccagaggcagagctggctgaagatctgcccactaccaaaagcacttctgtggagtcagagatgcccactgagaacctggaaggccattccccgtcttgccggaccttcgtgccactgcctcccatctgctccaactccactgtgcatagtgaagagaccctgtcccacctgagtgacacaactgtccgcctcagcccagagcgcccatcagatgaggactccaagagcacagagtccatcttcctgacccaggtacctgtatccagctgcccctgcccacttgttgctagctcccacaggttcctgtgcagcccttaggctcgattgctgtggacagctgggagcaacaagcacatggcaggtctggaaacaagaagtcagcacccttggcggagcttgcaagcctcttctgggagatctctggtctgaggacactgatagggatacctgatagggacacccatggggataagtcatggttctgtggcacagtcaagatctggggtctgactggggtgtgattccaactagtttttcagaggggtttgctgctgcctgtacctctctgcttcaggtctcctcacttttgatgctgcctctggatcctgggaacatagatcagatgcaggtcgtgcccttaaggtgctctcagtataatggggaacatagacaggaacagcttatgcaatcagtgctgagactgagggaatcccagaggctgggagtctggaggaaggagagatgcctctgccccagcccaggagggcttcctggaagaggctcaactgagctgagatttacaggctgagtaggaattaaaaaggtgaagatatagcagcaagggcattctggacagaggaaacagcatgaaacaggatagaggaaggaaattaaaatggtacatgcagaaaccacaaatgtttagtgtcagtgcagcagaagggtggcatgtggcaaagggtaatataaggctagaagagttggcagggcccccttgaactttattactgtaccatccctctccctgatctccctgcctctagtcttgcccctccagtctgctcactgccagatctttccaggatgtacatctatccattcatggaggtctaactctccatctatttctttttccacagatgacttatagtgacatataaatttatacagtataaaagtatcttaaagaaatatctcagaacctttttggagcaatgcagaatataaataagcattttaaaagaaacaatttgagagagttagatgaaaagaaaatacggacaggaaaggaaatagtacaagggtaattctgtcactcaacatgcacatcatgcactgctgctattataataaaggtgttttgaccaaaagcagttctgagctcctagcggcccaagccataccatcaattatgagtcaccacagttttcagaaaaaaaaaaaaaaatctttttttttctggcctaattgtcctggctataacctttaatacaatgatgaacagaagtggtgagagcagacttccttgtcttgtgcctgttcttaaggggaaagcattcagtctttcaccattaattatgatattaggtgagggttttccatagatgatctttatctggttgaggaagttactttctattcctagtttgagtgttttttaatcatgacagagtgggcttttcctatgtctactgagatgatcatatggttttgatatattatattaattgatttccagatgttaaaccaacctttcattcctaggataaatctcacttggtcatagtatataatcccttttacttgttgaattcagtttgctaatattttttgagaatgtttgcatttatattcataagtgatactgctttgtatttttcctttcttgtgatgtctttctctagtttggatttcagggtaatactaacctcagagaataagcctcttttaatttttggaagagtttgtgaagtattggtgttaattcttttttaaatgtttggtagcattcaccagtgaaaccatctggtccttggcttttctttgtgggaagtttaaaaattgctaattcagcttttttgcttgttataggtcatatatatgtacacacatacgtgtgtatatataatatatattcacaaatacacacacgtatatacatggtggggtctcactatgttgcccaggctgtagtgcaatggctgttcacaggcaccatcccactactgatcaggatgcgagttttgacctgctccattttctacctaggcaagttcatctctccttaggcaacctggtggtctcccactcctgggaggtcaccatattgatgccaaacatactgtggacactcgaggagcataatgcactacagcctagagctcccgagctcaagcagtcctcccatctcagcctcctgagtagctaggactacaggcatgtgccaccccacctggtgagtaattttaataaataaatacatccctacatgacatacagatttcttataaagccattaggataggctaaaatcctccatggtttgccatcagagtgagcataaagaaaatacaaaataaaacgcaccctcagcttggcatataatggtccttaccgatccgggtcctgcttaccactgcagttgcctatctcttcactttgtacttaactgtaccaatctttagttccccgaaaatgcaccttgatgtttcttacctctgcgcctttgctcgtgctgttccttgtctgaaacaatcattctttctcatcacttgcagtccacacctctccccattgctccgtagggatggctctcctggctcttcaagacttagctcaggctaaggcattcctccaagggagcttcttggctaggttggggcttcctctgggatcacccaaaaccactgtattccctctgttaaagcatttatcaattgtctatttttatatctgctttcttccatcccagtcttggtcttacccttgcccttaacagggcccagcagagaccagcacagagatgatactccgaatgttcatggaatgaatgaatgaatgagtgacaaatgaatgcgttttcttcctgggcacaggtgagtgaactgccttcctccgtcatccataaggatgatttagagttaaaggagaaagaccaaaagaaaccaccaacggcacccagagaggtgaaagggactcggaggaaactcccaactgccttccttcccagcaagtaccacggctatgaagaactgctgacagccaagcctgatccagccttcattgagccaaagggtatgtgagggcatatccttgctctagggcaagaggccatctccacagctcagagcaagtcagggtcaagccaaggctggcaccaagctgtcttttcccaactagggtgctgtcctctgtctaaatacctgtcaaagggctccttttagggtgtcctttgtttgaagccccacatattgggacccctgtcctggcctaggccttcactggcttatggggagccacagtttattcagagattctagttggtctcagcctagctgctctggatgataaagtctctcctcaggaaaagtgtgatgaatgaacacccagaatggccagattcttgagcttttcccagcccaggttaagttcccaaactgaacgtccaaaatcgttcctatctggttggaggcaaaggaggcagcttcatctctgtgttaatcagtacttccaaagcaactggcattcagctgggctgttctgggtgttagcccctgcgatataaccccctgaggttaatggggtcacattggagccagccttttcccccactccaatactatttacccattacaatctgtgctatttttccattataatatgggacaaatactcactgaagaatgatggaacttcaggcactggaacagatccggaagaaacctgggggcagtgttttcttttgtgggactctcaaatccttttacctagagctgctgtgagactgaggaatgaagcaatcaggggaggcatctgggaggaggagggggaagtgccttgactcagtcttgccttcttgccctaggaatccagaagaatgcacaagccctgcaacaaatgctgaagcacccactcctgtgccactcctccaagcccaagctggacactcttcagaaaccctatgttcacaaagagaaacgggtaaacatccagctcactgaatgtgtaaatggcccctgagtaccgcccacaattacagatgtggctgtcaccttgggaccctctgagggccatgctttcccagcacccccagatgccccccagcctgttgctgtgactgtatgaagttaggccagggaagtctgtgcataaacctgggataacaccctcctccatgaccttctgccaggcccagagaatcccgattccacccccaaagaagactagagcccaacttctggatgacatcttcattcgcttgcgggatccccggaacattacagaggctccactaggtacggctctgccacagctgccaggatcccagatccagttcacgcctgctggctaaaggcaaagaaagggcttgtgtcagtgcaggaaaggcccttagagagcaactgcctacatcagtctctacatgtagatggacaaaaggagagccagcgtgaggcagggagttgcctaaaatcacacagcatgttaaggtcctgaaccagggcttaagatagagtcaatgcagaggggcagtaggaagtcagtgacttcccaagctggaaaggccatttttagccccttagcatcctcctgccacaccatcccattttccaagggtctctggacccaatcctcttgcttctggctaggtgagaaccaggatgagcttggtgcctctcctggcttcttttcctgcaggtgctgtcctgcaccagtggacagaacggcggctggtgaaccacaagcagtacctggaggccaagaggctgttgaaggagttccaggcacgttaccggcagctggtgagtggctctctgcgcacagtgttcgggactaccccgctccccatggcctgcccagcgctgagtgagagccagcccaagttcggccacttcctcgagttcatggatgagttctgccaggagcccacagccagtgactcacaaggctagagctgtgcatgggggctgtgtgcaccacccggcctgtgccccagctctccccgagggctctgtgccctggaccgcacctcaaggttgaccagccggctacaggcctcagagctcagctgggccccacttgctggccacaaggtggcatccccttgtcaggatctcccctccttggcccaggcatgacctggtgcctggcccagcggcaataaagagtgggtgcacagggcaata

SEQ ID NO: 10150 - DNA, 93 bp, Homo sapiens
tgttgcccaggctggagtgcagtggcatgatcttggctcactgcaatctccacctcctgggttcaagtgattcttctgcctcagcctcccgag

SEQ ID NO: 10151 - DNA, 6648 bp, Homo sapiens
ggtgccacatgcattctttcttggaacccaggccacagcagcattgtcacacttccctctaaaaatggttttccagttcagatgcaacagggatacatttgttctctgttgtatgagaaactgacaccaaggggatcttaacaaattcctgaacaatggctccaaaaaagggtatttttaaaaaccagatcttgtgagtacagccctaatgtgcagggacagtgtcatcctgtatattcgttctttactcagactctttcttggttccttcattaggagcatgaatggttgaatgtgaacatgacagtaaattggagcaaactgtaaactggacataacttatgccaaaagacgtagttgtacaccatggaaaccccatccctgctcctaatctctactgccattctgaatgccaaagcaagacatccaacatggggcatctcccagagcacatacagcaccaaaaatccacacacagcctaagcttaacccatgtttttgtctgagattgttcaccagagacaagactctgactataaacagaacatccactttcatgagtttcctttactgtattctcaacttgggccttgcttcaagcaggcaaacatacattgaagaatgcactttggtactgtttaaataacaacacatcagcccacttgattccatgccatgtccttgctgacagaaacatccccaacagggcatgccctggtccaagtcctctgtctttgtcaaaatgctcttctgatgagttggagaggaggcagccagcagtggcagtccacaaggatccaggtaccttctccaatcctaaagcagacagcaggttgaataaaaccaatacacaacctattttctaggcaggaggggaaaaggcccttaggacaataatatttgtacaaagagttgagagtaaacaaacagtgtatcaggttcaaaaaaaaaaaaactattcgttggcatttaaatttttttcccttgcatagtatctattctctcactaggacttttaagtgctctgctggaggctcagcgttggtaataccatgtttgatgcaaacttgaacccaatgctctcattggtggcacagctttggagggtggtggccccaagaaggggcaatctgcctgctgctatattaatctggaaccagggccaacagctactcttgaactatggtatttgaagagcgagttcattgcctgttttaccttaaatgacaggaaaggaagatgaacaaaccttgctttgccttggcttcaaactagttcttgatttaagacaccagaaagggagagagggagtctgcttagagtttgaggttgcctctcacaagatgacagttaaaagttgccaccttacttaaaaggcattaaggaggcatttactcacaaaggagagagagtaaatttttttcttaagaggaaaaaaatactgataatacatagaacaatctgcacatccagtcttggcactttttccaatttgactgatctctaaactggtgacccttgcatatatcttagtctcttttctacaatcttcttcagaaagctacagcagctaacaatcatgtataaagatgcatttcctagatcatcttcagaagaaaatctcttcagcactttccctagaatctgtctcctgaccaccccgccccagacctgctttctcttttgagaattcataaccaggtatgtttagataccagttcaaaagaccactctatgggttgatgaggaaaaggctgcctgaggacaatttaagaccataatgagtttccaatttttaaagaaaatttggctagctggcttttaattcttaattaaaatcattaaatttaattaaaattattccaatcaaaatatatcactttccaagattccacattcatattacttacttatactatggagactttctctacctgagcatgtattcaggggctataggtacatttaactctaactaactgaaaaaaatcaggaagaaaaaactattaaaataaaataacctcctaaatcatttgggggtatccccatcattggtgcgtgtgtctgcgtgtgtcaaactttaatgattatttattcagaccctggaaaaccacactataaaatagggcactggatcacaagttcgtttggttaaaaaaaaaaaaaaaaaaaagtgggggcggggggcagagaagaagtttaacttggatgatttccatgcccattccagctgtaacattctatgactgtgacccagcctttgttctcttttctcactctcctactagacatttcaatgaaaagttaggcaggaaaaaggaaaggaatcccaagttgctgccagctctgatgagagatcaggttgggggagagattaggtggttactgaattgaggtgtgggcctcccctgaccatgtcagtgatccacaacccacctcacttcttggggcttaagctaaaagcagcttctgaagagatgttaatgtcctgtaatcactagaggagaaaattcattctccttccataacattacttagtaaaggaaaagcggtggtgcaatcaaattcacaaataccaatggggtctctaaaatgtagaatgcagcttgctgggtgctggtcagttttctaaatgggaccagaaatggctttcctaagaccataaatgaactctccagccacacatacattcaaatgcattccattagacattgagctcctcaagagcaggaactgctttatctccacagtccagctcagggttggctcaagtctgaagctcagtaaatgtctgtcaaatagaaaagaaaggatgagccttcggtcatcagctacatgagtcaggcacggtggcagcttcccattttagtcagtttgccagtttgtaaccagacagtaatcaattaagagctttaatctcttaaggacatttttcctttagggaaaatgaacaaaaaataaaacatttattaccagtgctgcttccaagcaaaaatttaaaaattaaattaaaatttaaaaaataagtgaagccacttaggagtttccctggcaagcctcacccaagaagacttaaccttttttaaaaagaggcaaatagattaaaggggccaggggctggatgcataatcccctgatctgataccaacccaacaggcccagatgacttcttccagcagatacaatcaatgggtcaagaacattttctcaaagtttctttccctctctatggaaaagagctgacagcccccttctaagggcaccacatttcctggatttcccctcagactgaccttcaccctcccccctaacttcccctttaataataaaaaaacccagaatgcatatatacaaggaacagagtaagacatgggtaatttgtatggtgaactgggcttcaatgatttgtgaggaatttgttttgtgaaatcctgcacctcttattctagctcacaaacccttcccatcgttctgtttccttccttgtccttttctgttcccccaaataatacacatcaacatatcgacttttaaccaacttcagaatcatggaaggagagagggagatttttcagaaagaaaagcattcaggttttagttattaaggatgggaagcatcttaaaattcagataataccttagtggtttttccttcctccaaagccaacctgattaaagatcaaccctcctccctccttaacctagaccactctacctatatttgaaggactgttgctcagcaggaagtttagaaaacaactgtcaataccatcctaggcatcactgtaggtacaaggggggaaggcagtaagctggacctagagtttggactatttgcttaacaagaatttgttcttcattctgcacttgttacaactgctatgcaattcttaaaatgaaagtattaatttggggaaatatttaaaatatatatcttttatctattaaaaatatttctttttaccaaagacaaaaatcaattccaactgaaaagtgtttttcaaattactggagatatagagaaagatggcaagtggaaaaataagtgtctttgctcctaccaacaagactagccttccaataatatttactaagatcaaaaaggaaatgcgtgaaatggcagtaactgataagtttcctctaagggcatttatagtaaggtcaccctccctgtcttctgtaaaccagagccagctcttctgttttgggcacaaacatgccctccagcagctcttggaggacataaattgttggtagggcccagaactgaagtggtgtgactacaaaatcatgagtttggtaaatgtttttaaaacatacatctgcatatgtgcacacacacagagaacacagaatgcatacattcaggtgagtgatgttccccaccaacgtagtcaccaaagagattccacctatctcaatgatgaccacaatgtttaagacatctctggaatttctgtttgggaactgtttgggaactatgagctgcacaagaaaatggctctgctttacagcagcactcattactacaaacccacttgataagccaccttctttcccagaggcttcaaatagctgctggctagtctcagacattacattctctctctctctcaaccacaaataaccacaaaacactgaagatttgccctgagaaaaggcaaatctgagaacacttaaaaggagttatactatctgccttgatcaatgggtcactgttctggactttggcttctaggtctagaagctgaggaggaccttaggaggaggctggaatagataaccattaaggtcccttccagttctagcattttgggagtcagtgtttctagtctttgaagacagttccagaaatgctttcaccaatggcactggaaaaactaagcagtatcctgctggggctactcaaaggaaacaacatatattgggatatataagctctggaaggtctgttaaaatgccagtcacatgactttatatagtaactcatactacatggggcatgccagcccatcagaaattccctaaaatcatatcttcatccctattctcaatgagcccagatgggcagaagcaccaagcaccaccagggatgcaaaagacacatggtgtcagctgctaaggaaaataaacccccaaaggtccatgggactgaatttaccagctgcatccagctagataccttgtttccatagtatggagtttaagtattgttccttgcctgacttcagggtgattttttaggattttagatcaacattgcagataacccttggccatttgaaaagtaataatgaagcctgattatagtttgtctcataggctgaaacccccagaaaagcagaaggctctaaactgtgggggatggggataatgcacatatatgtttatccaccctgtcgatcttgtttgcatgtggattctgcactatcagtgttcaatgcccagcctagcttcccctaggctcccctggcacacccttaggttgtgatctatttgggaaacctttagaaaatccatgggttatgccacttggtagttgagagaaccagaacatctgcactgcagtttcatcatctaaaaatggggctaatgccagttacatgagaggtctcttggaaagactaaattaataaggtctgtaaatgtgctctgtcaactatatagcattcaccaaatattattttttaaacagagaatgtaaattaacttttgtaaaggcataatcttaactgatatatttacttatttttggcaagggacagcagaaagcgtaacataaccatctatcattttggatctgccaaggaactaaattgttcacttgtctgaaaaagatggaattaatttttatctgcaaggctgatttaaaacaataccctgctgaaagaagtcaggaagtctatcagtttaagaaggtatcccctctttaccattactaactgtggccattatgctcctgaggccgttccaaatctcattcccagtgggtgctgccaggtttggcccagaagcccttagggatgggtcactcaggcttctggcctgggtcacagagaaacggagatgcttttcccttggatattgactacaaaggccctggaacctctcagaaccatattagacagtgttttgccattaaaataaaaccaaagtgagaacactcagctcttcaggataaatgatcaaggcctaagaccttttaaaaataggtaacacttcattaggtgctacttggccccggccatgttgctggaccgtaggagatactgatccacacttccttttcgccggctcacagtccgcctctcattgtcgaacatgcgctgcaactgcagagccaactgtcggtcttcttcctcttgctgaagcttctgctccatctctcgcaggactgggtctgttggggccagacccacctccccactggtttgtcgcagttttttaagggagccattttgttctaagtgcttggtcttgcagtgtcttttccggcctcgacgcaaagaaggaagtggctcttcacttaggctctcaactagaacaccattagtcagatcaaaatgatttaatgtcttcaattgttgctttgttttgaggactccacccaaaacactgttttggggtagcactgaattaactgtggtg

SEQ ID NO: 10152 - DNA, 2189 bp, Homo sapiens
ggtgccacatgcattctttcttggaacccaggccacagcagcattgtcacacttccctctaaaaatggttttccagttcagatgcaacagggatacatttgttctctgttgtatgagaaactgacaccaaggggatcttaacaaattcctgaacaatggctccaaaaaagggtatttttaaaaaccagatcttgtgagtacagccctaatgtgcagggacagtgtcatcctgtatattcgttctttactcagactctttcttggttccttcattaggagcatgaatggttgaatgtgaacatgacagtaaattggagcaaactgtaaactggacataacttatgccaaaagacgtagttgtacaccatggaaaccccatccctgctcctaatctctactgccattctgaatgccaaagcaagacatccaacatggggcatctcccagagcacatacagcaccaaaaatccacacacagcctaagcttaacccatgtttttgtctgagattgttcaccagagacaagactctgactataaacagaacatccactttcatgagtttcctttactgtattctcaacttgggccttgcttcaagcaggcaaacatacattgaagaatgcactttggtactgtttaaataacaacacatcagcccacttgattccatgccatgtccttgctgacagaaacatccccaacagggcatgccctggtccaagtcctctgtctttgtcaaaatgctcttctgatgagttggagaggaggcagccagcagtggcagtccacaaggatccaggtaccttctccaatcctaaagcagacagcaggttgaataaaaccaatacacaacctattttctaggcaggaggggaaaaggcccttaggacaataatatttgtacaaagagttgagagtaaacaaacagtatatcaggttcaaaaaaaaaaaaactattcgttggcatttaaatttttttcccttgcatagtatctattctctcactaggacttttaagtgctctgctggaggctcagcgttggtaataccatgtttgatgcaaacttgaacccaatgctctcattggtggcacagctttggagggtggtggccccaagaaggggcaatctgcctgctgctatattaatctggaaccagggccaacagctactcttgaactatggtatttgaagagcgagttcattgcctgttttaccttaaatgacaggaaaggaagatgaacaaaccttgctttgccttggcttcaaactagttcttgatttaagacaccagaaagggagagagggagtctgcttagagtttgaggttgcctctcacaagatgacagttaaaagttgccaccttacttaaaaggcattaaggaggcatttactcacaaaggagagagagtaaatttttttcttaagaggaaaaaaatactgataatacatagaacaatctgcacatccagtcttggcactttttccaatttgactgatctctaaactggtgacccttgcatatatcttagtctcttttctacaatcttcttcagaaagctacagcagctaacaatcatgtataaagatgcatttcctagatcatcttcagaagaaaatctcttcagcactttccctagaatctgtctcctgaccaccccgccccagacctgctttctcttttgagaattcataaccaggtatgtttagataccagttcaaaagaccactctatgggttgatgaggaaaaggctgcctgaggacaatttaagaccataatgagtttccaatttttaaagaaaatttggctagctggcttttaattcttaattaaaatcattaaatttaattaaaattattccaatcaaaatatatcactttccaagattccacattcatattacttacttatactatggagactttctctacctgagcatgtattcaggggctataggtacatttaactctaactaactgaaaaaaatcaggaagaaaaaactattaaaataaaataacctcctaaatcatttgggggtatccccatcattggtgcgtgtgtctgcgtgtgtcaaactttaatgattatttattcagaccctggaaaaccacactataaaatagggcactggatcacaagttcgtttggttaaaaaaaaaaaaaaaaaaaggggggggcggggggca

SEQ ID NO: 10153 - DNA, 2577 bp, Homo sapiens
ggtgccacatgcattctttcttggaacccaggccacagcagcattgtcacacttccctctaaaaatggttttccagttcagatgcaacagggatacatttgttctctgttgtatgagaaactgacaccaaggggatcttaacaaattcctgaacaatggctccaaaaaagggtatttttaaaaaccagatcttgtgagtacagccctaatgtgcagggacagtgtcatcctgtatattcgttctttactcagactctttcttggttccttcattaggagcatgaatggttgaatgtgaacatgacagtaaattggagcaaactgtaaactggacataacttatgccaaaagacgtagttgtacaccatggaaaccccatccctgctcctaatctctactgccattctgaatgccaaagcaagacatccaacatggggcatctcccagagcacatacagcaccaaaaatccacacacagcctaagcttaacccatgtttttgtctgagattgttcaccagagacaagactctgactataaacagaacatccactttcatgagtttcctttactgtattctcaacttgggccttgcttcaagcaggcaaacatacattgaagaatgcactttggtactgtttaaataacaacacatcagcccacttgattccatgccatgtccttgctgacagaaacatccccaacagggcatgccctggtccaagtcctctgtctttgtcaaaatgctcttctgatgagttggagaggaggcagccagcagtggcagtccacaaggatccaggtaccttctccaatcctaaagcagacagcaggttgaataaaaccaatacacaacctattttctaggcaggaggggaaaaggcccttaggacaataatatttgtacaaagagttgagagtaaacaaacagtgtatcaggttcaaaaaaaaaaaaactattcgttggcatttaaatttttttcccttgcatagtatctattctctcactaggacttttaagtgctctgctggaggctcagcgttggtaataccatgtttgatgcaaacttgaacccaatgctctcattggtggcacagctttggagggtggtggccccaagaaggggcaatctgcctgctgctatattaatctggaaccagggccaacagctactcttgaactatggtatttgaagagcgagttcattgcctgttttaccttaaatgacaggaaaggaagatgaacaaaccttgctttgccttggcttcaaactagttcttgatttaagacaccagaaagggagagagggagtctgcttagagtttgaggttgcctctcacaagatgacagttaaaagttgccaccttacttaaaaggcattaaggaggcatttactcacaaaggagagagagtaaatttttttcttaagaggaaaaaaatactgataatacatagaacaatctgcacatccagtcttggcactttttccaatttgactgatctctaaactggtgacccttgcatatatcttagtctcttttctacaatcttcttcagaaagctacagcagctaacaatcatgtataaagatgcatttcctagatcatcttcagaagaaaatctcttcagcactttccctagaatctgtctcctgaccaccccgccccagacctgctttctcttttgagaattcataaccaggtatgtttagataccagttcaaaagaccactctatgggttgatgaggaaaaggctgcctgaggacaatttaagaccataatgagtttccaatttttaaagaaaatttggctagctggcttttaattcttaattaaaatcattaaatttaattaaaattattccaatcaaaatatatcactttccaagattccacattcatattacttacttatactatggagactttctctacctgagcatgtattcaggggctataggtacatttaactctaactaactgaaaaaaatcaggaagaaaaaactattaaaataaaataacctcctaaatcatttgggggtatccccatcattggtgcgtgtgtctgcgtgtgtcaaactttaatgattatttattcagaccctggaaaaccacactataaaatagggcactggatcacaagttcgtttgggtataaaaaaaaaaaaaaaaaaagtgggggcggggggcagagaagaagtttaacttggatgatttccatgcccattccagctgtaacattctatgactgtgacccagcctttgttctcttttctcactctcctactagacatttcaatgaaaagttaggcaggaaaaaggaaaggaatcccaagttgctgccagctctgatgagagatcaggttgggggagagattaggtggttactgaattgaggtgtgggcctcccctgaccatgtcagtgatccacaacccacctcacttcttggggcttaagctaaaagcagcttctgaagagatgttaatgtcctgtaatcactagaggagaaaattcattctccttccataacattacttagtaaaggaaaagcggtggtgcaatcaaattcacaaatac

SEQ ID NO: 10154 - DNA, 3669 bp, Homo sapiens
tctcgtcccagggtttttaagtggaaccgccccctgcccatgctgggcccagcacaccagccaatcggcgctcggggggcggacccgacgcgggcgcctcagaagcctcagcttcaaaaccccgcccccggaaaggcccgcccagcaagcgagaggaggaggccacacatgtttattaggccggtcctgacacctgcctgcggggaaggaccaccgagaccagatcctgggtgccatggggtgcagggacagaccggtgcatggcagcggctgcgcctagccgcgctcgcagatgacctcaaccacactgggctccatgggcacagggtctgggcagcgcagggcagcagaggccaccacttcgtccagcagcaagtgcacgagttcttcgtcggccacaaaacgccacaggtagagctgcagaaagtggcagtccacttgcacctgctgcagcccgaagcgcccaaaggtgcgcagccgcacacactccagcagcgtcttcaggctgatcttgatgatgccggtcagcaccgacacctgcaggcagggacacagggatgcagcttggggactgcaggtgtgtgtgggggacacccaagttccaagcaggggcccgggagacatacgatggaagtagctgggatgaggcagaaagtctccggggccagataagaggggagggatacaatattagcgccgtcatctggagggcaggggacaggtagggcccagcaatcagaggcatccctgagcttggagtgaggcggggcagggaccatgggtgaacagaaaaccctggggaggacccaagactactgtggggataaggacaagggcaaacagtaatcccaggtcagcacccagactcaggctgggcatacaccaagactgggacaagggctgtgggatttggaggcagggcactctgtactacctaaaaacagccctagagacagagactggagggtcagggtcacccccagttggtcacagagtcctggggctccttgggcaggtgtggggctgctccagccaaccctccccgggatccctggaagtctgagtcacgttggaagtcggaccttgttgaactccacagggctgaacacatcaatacgttcagagaatagcttctggatattgctcaagaggttggtgtccatcggggcactggattggggaagacaaggaatcagagcccgccctgcaccctcgccctcttttgtcccttccccctggggctcccctgaccagccagacctgggggtatagctgggggcgtagcggccctgctgccgagagctgctgtacacggagaaagtcctcttgctggagtcgctgctctgggccttgcgaacaccctcttcgtacaggagccccacctggtggtaaaaagaggtactgcaaggaggcccgagtcaggggaaaccaccagcccatcggtgctgaggatgccctaagtcagctactcaagcatcacaaggatcacagggtaatcaccgcggggcccgctatttagtaggtacatggtcgctatttatagaaccagtggagtggggcaaaggcaggatacaagagttggtctgaggtctaatcttcagcaccagcaccaaccctgccctgacttcctgggtaaccctgagcctctgcttctccacaggtaaaataggggcgaagatgtcataatcctgggctgagaaggaacaagaccgtggacataggcactccccagcccgtttggtcttcatccttggagacttgttcccctggggttccctcacggacgccctggctacagaactggccccgtgagaagcccagatacacatgtcccctcctccaggcagggactgccagtgatcctctgctgccccagcccctcttgaagggacagtacccccagcctgcgtcagggctaccccggccagcctgggcagcacctgcacgtcgatggcggtggtatcctccaccacccgcttcatgacggcccgcacattccggggctccagagtgctgagccagtcgcgagtctccacgctcttgcgcagcatctgtgatatgaccaggccctgcaccttcacgtagtgggtcagcagccgccgcgccgtttccctggcctctgcacacagcgtgctcacgggcgtcactgggaactgatcctgagccaaggaggcagaggacagagggagtgggtatggtgggggcagctcaggggccactgccaaccaggagctgggcacagattgggcaaggtggaggctggggtacacacaggcagctggtctggggtctggccatgagggcactgtccagccatctgcattcccagcaacaccattccctgcccggctaggagctagtgcttcacctgcaccagaaactgttcatcagtgagagtgaggatgtaggagatggtggccgtctcgtagtccaggcagaggcgggagagcagcaggagcagggcaggtggtgtggcaccccccttctccccagggctgtcgcagaagctctgagccgtctggcacatagagtggacgaagcccacgatgaggccctcacggacaccctgactgcagaactcaccctgcaagagaaggtgcccaggtccacagcaggtcccctcttccaggtaaggctgttaatgaccctctgctggggctctaagtgccccagccccctctgcaagggacagcatcatcctacattctaagtaccccggagcagcttccctgagtgggggcagagaaagccaacactggggaccccaccatgccctgcttctcagcccagctgcagatgccctgagccttccccaccccccagaccgtgcataagaacctgaaaccacacccagagtgcctggtttccccagtttcccaagcactggcataaaaggttttggagggtcaaccagcaggttgaacaaggaacacccaagaggaggcgtacccggaagtagggcttgttggagaaggacacctctttggcggtgaaaaggtgcactgctgccagagaggccttaatgtggctcaggatggagctggccacattggccagcaactcggccaggccagggccctccttcccagccacgcgaggtgctgccagcgcctggcggacgtctgtcaggcagcccaggaaggccgcccggagaccctgcaggtggtggcccaggcgctcgcgggccactcgttccacgatctccgtggcagcgtctgcgagcccggcagcggccagcagggccccgggagcccgcaagcgccggtggaagcggtccagcgcccgcaccagcagtgagttgtcaccaccaccctgctcctgcgccagccgccgctccaccagcgcaaaatagcggctgcccagctgccgggcgaaggccgccagcttctcggcacctgctgggccctgggccgcaaacagctcctggtaggccgccgccacctggcagaggccgcccacgaagccactgcctccatggtcggtgaactctaacacgtcgggagccggaggtgagggccccagctcggcctccaggtttctcagctccttctccagccggccgcgggcgtgcgccaggaactcctcgcacagctcctccgcaggctcgcccagggccagcagcagctccacgcactctgcctgctccggggcgcctgagccgccctccct

SEQ ID NO: 10155 - DNA, 1698 bp, Homo sapiens
tctcgtcccagggtttttaagtggaaccgccccctgcccatgctgggcccagcacaccagccaatcggcgctcgggggcggacccgacgcgggcgcctcagaagcctcagcttcaaaaccccgcccccggaaaggcccgcccagcaagcgagaggaggaggccacacatgtttattaggccggtcctgacacctgcctgcggggaaggaccaccgagaccagatcctgggtgccatggggtgcagggacagaccggtgcatggcagcggctgcgcctagccgcgctcgcagatgacctcaaccacactgggctccatgggcacagggtctgggcagcgcagggcagcagaggccaccacttcgtccagcagcaagtgcacgagttcttcgtcggccacaaaacgccacaggtagagctgcagaaagtggcagtccacttgcacctgctgcagcccgaagcgcccaaaggtgcgcagccgcacacactccagcagcgtcttcaggctgatcttgatgatgccggtcagcaccgacacctgcaggcagggacacagggatgcagcttggggactgcaggtgtgtgtgggggacacccaagttccaagcaggggcccgggagacatacgatggaagtagctgggatgaggcagaaagtctccggggccagataagaggggagggatacaatattagcgccgtcatctggagggcaggggacaggtagggcccagcaatcagaggcatccctgagcttggagtgaggcggggcagggaccatgggtgaacagaaaacctggggaggacccaagactactgtggggataaggacaagggcaaacagtaatcccaggtcagcacccagactcaggctgggcatacaccaagactgggacaagggctgtgggatttggaggcagggcactctgtactacctaaaaacagccctagagacagagactggagggtcagggtcacccccagttggtcacagagtcctggggctccttgggcaggtgtggggctgctccagccaaccctccccgggatcctggaagtctgagtcacgttggaagtcggaccttgttgaactccacagggctgaacacatcaatacgttcagagaatagcttctggatattgctcaagaggttggtgtccatcggggcactggattggggaagacaaggaatcagagcccgccctgcaccctcgccctcttttgtcccttccccctggggctcccctgaccagccagacctgggggtatagctgggggcgtagcggccctgctgccgagagctgctgtacacggagaaagtcctcttgctggagtcgctgctctgggccttgcgaacaccctcttcgtacaggagccccacctggtggtaaaaagaggtactgcaaggaggcccgagtcaggggaaaccaccagcccatcggtgctgaggatgccctaagtcagctactcaagcatcacaaggatcacagggtaatcaccgcggggcccgctatttagtaggtacatggtcgctatttatagaaccagtggagtggggcaaaggcaggatacaagagttggtctgaggtctaatcttcagcaccagcaccaaccctgccctgacttcctgggtaaccctgagcctctgcttctccacaggtaaaataggggcgaagatgtcataatcctgggctgagaag

SEQ ID NO: 10156 - DNA, 286 bp, Homo sapiens
  SITE (60): n equals a,t,g, or c
  SITE (101): n equals a,t,g, or c
  SITE (143): n equals a,t,g, or c
  SITE (156): n equals a,t,g, or c
  SITE (214): n equals a,t,g, or c
  SITE (218): n equals a,t,g, or c
  SITE (240): n equals a,t,g, or c
  SITE (270): n equals a,t,g, or c
tctcgtcccagggtttttaagtggaaccgccccctgcccatgctgggcccagcacaccanccaatcggcgctcgggggcggacccgacgcgggcgcctcanaacctcagcttcaaaaccccgcccccggaaaggcccgcccancaagcgagaggangagccacacatgtttattaggccggtcctgacacttgcctgcggggaaagacaccganacanatctgggtgccatggggtgcanggacagaccggtgcattggcagcggctgcncctaaccgcgctcgca

SEQ ID NO: 10157 - DNA, 4280 bp, Homo sapiens
tctcgtcccagggtttttaagtggaaccgccccctgcccatgctgggcccagcacaccagccaatcggcgctcgggggcggacccgacgcgggcgcctcagaagcctcagcttcaaaaccccgcccccggaaaggcccgcccagcaagcgagaggaggaggccacacatgtttattaggccggtcctgacacctgcctgcggggaaggaccaccgagaccagatcctgggtgccatggggtgcagggacagaccggtgcatggcagcggctgcgcctagccgcgctcgcagatgacctcaaccacactgggctccatgggcacagggtctgggcagcgcagggcagcagaggccaccacttcgtccagcagcaagtgcacgagttcttcgtcggccacaaaacgccacaggtagagctgcagaaagtggcagtccacttgcacctgctgcagcccgaagcgcccaaaggtgcgcagccgcacacactccagcagcgtcttcaggctgatcttgatgatgccggtcagcaccgacacctgcaggcagggacacagggatgcagcttggggactgcaggtgtgtgtgggggacacccaagttccaagcaggggcccgggagacatacgatggaagtagctgggatgaggcagaaagtctccggggccagataagaagggagggatacaatattagcgccgtcatctggagggcaggggacaggtagggcccagcaatcagaggcatccctgagcttggagtgaggcggggcagggaccatgggtgaacagaaaaccctggggaggacccaagactactgtggggataaggacaagggcaaacagtaatcccaggtcagcacccagactcaggctgggcatacaccaagactgggacaagggctgtgggatttggaggcagggcactctgtactacctaaaaacagccctagagacagagactggagggtcagggtcacccccagttggtcacagagtcctggggctccttgggcaggtgtggggctgctccagccaaccctccccgggatccctggaagtctgagtcacgttggaagtcggaccttgttgaactccacagggctgaacacatcaatacgttcagagaatagcttctggatattgctcaagaggttggtgtccatcggggcactggattggggaagacaaggaatcagagcccgccctgcaccctcgccctcttttgtcccttccccctgggctcccctgaccagccagacctgggggtatagctgggggcgtagcggccctgctgccgagagctgctgtacacggagaaagtcctcttgctggagtcgctgctctgggccttgcgaacaccctcttcgtacaggagccccacctggtggtaaaaagaggtactgcaaggaggcccgagtcaggggaaaccaccagcccatcggtgctgaggatgccctaagtcagctactcaagcatcacaaggatcacagggtaatcaccgcggggcccgctatttagtaggtacatggtcgctatttatagaaccagtggagtggggcaaaggcaggatacaagagttggtctgaggtctaatcttcagcaccagcaccaaccctgccctgacttcctgggtaaccctgagcctctgcttctccacaggtaaaataggggcgaagatgtcataatcctgggctgagaaggaacaagaccgtggacataggcactccccagcccgtttggtcttcatccttggagacttgttcccctggggttccctcacggacgccctggctacagaactggccccgtgagaagcccagatacacatgtcccctcctccaggcagggactgccagtgatcctctgctgccccagcccctcttgaagggacagtacccccagcctgcgtcaggactaccccggccagcctgggcagcactgcacgtcgatgggggtggtatcctccaccacccgcttcatgacggcccgcacattccggggctccagagtgctgagccagtcgcgagtctccacgctcttgcgcagcatctgtgatatgaccaggccctgcaccttcacgtagtgggtcagcagccgccgcgccgtttccctggcctctgcacacagcgtgctcacgggcgtcactgggaactgatcctgagccaaggaggcagaggacagagggagtgggtatggtgggggcagctcaggggccactgccaaccaggagctgggcacagattgggcaaggtggaggctggggtacacacaggcagctggtctggggtctggccatgagggcactgtccagccatctgcattcccagcaacaccattccctgcccggctaggagctagtgcttcacctgcaccagaaactgttcatcagtgagagtgaggatgtaggagatggtggccgtctcgtagtccaggcagaggcgggagagcagcaggagcagggcaggtggtgtggcaccccccttctccccagggctgtcgcagaagctctgagccgtctggcacatagagtggacgaagcccacgatgaggccctcacggacaccctgactgcagaactcaccctgcaagagaaggtgcccaggtccacagcaggtcccctcttccaggtaaggctgttaatgaccctctgctggggctctaagtgccccagccccctctgcaagggacagcatcatcctacattctaagtaccccggagcagcttccctgagtgggggcagagaaagccaacactggggaccccaccatgccctgcttctcagcccagctgcagatgccctgagccttccccaccccccagaccgtgcataagaacctgaaaccacacccagagtgcctggtttccccagtttcccaagcactggcataaaaggttttggagggtcaaccagcaggttgaacaaggaacacccaagaggaggcgtacccggaagtagggcttgttggagaaggacacctctttggcggtgaaaaggtgcactgctgccagagaggccttaatgtggctcaggatggagctggccacattggccagcaactcggccaggccagggccctccttcccagccacgcgaggtgctgccagcgcctggcggacgtctgtcaggcagcccaggaaggccgcccggagaccctgcaggtggtggcccaggcgctcgcgggccactcgttccacgatctccgtggcagcgtctgcgagcccggcagcggccagcagggccccgggagcccgcaagcgccggtggaagcggtccagcgcccgcaccagcagtgagttgtcaccaccaccctgctcctgcgccagccgccgctccaccagcgcaaaatagcggctgcccagctgccgggcgaaggccgccagcttctcggcacctgctgggccctgggccgcaaacagctcctggtaggccgccgccacctggcagaggccgcccacgaagccactgcctccatggtcggtgaactctaacacgtcgggagccggaggtgagggccccagctcggcctccaggtttctcagctccttctccagccggccgcggcgtgcgccaggaactcctcgcacagctcctccgcaggctcgcccagggccagcagcagctccacgcactctgcctgctccggggcgcctgagccgccctccctgcacgagggagaggtagtgaagggcagggccggggctgccggtggatggggcaggagcaggaaagcaaagcacacacagggcagggggacagctccaggagggcccaggagccgggcacagatggggctcggggctggcgggagcgctggggtcagggcagaggggccacacctaaagcgctgccgcagctgctgggccaggcgggccgtgatgacctggcagtcgtcctggatggcgcggaacgagggcaggtgttggtactgctgcagcacgcctgcgcgcggccctggtagcgcaccgcctgcccataggcgcccagttccacgcacttggtgaggcgcgagggcagctcaaagaggaactgcagcttccgcagcagcgcgtggacccctgggggacggagggtgacgttagccccagagccccaggaaaggcccactgcaggccctgcccggcagcgcccacctgccagcttggtgatgcgctcgtggcggtcctgcagcgtggcgctgatgcgagcgctgaagtcggtgatcactgccatgttggtggccagccggtccatctcatcctccatcttccggaaatcgttcttcatcttccggatggtgtct

SEQ ID NO: 10158 - DNA, 767 bp, Homo sapiens
  SITE (118): n equals a,t,g, or c
  SITE (120): n equals a,t,g, or c
  SITE (124): n equals a,t,g, or c
  SITE (127): n equals a,t,g, or c
  SITE (129): n equals a,t,g, or c
  SITE (157): n equals a,t,g, or c
  SITE (176): n equals a,t,g, or c
  SITE (184): n equals a,t,g, or c
  SITE (215): n equals a,t,g, or c
  SITE (244): n equals a,t,g, or c
  SITE (270): n equals a,t,g, or c
  SITE (284): n equals a,t,g, or c
  SITE (303): n equals a,t,g, or c
  SITE (315): n equals a,t,g, or c
  SITE (328): n equals a,t,g, or c
  SITE (342): n equals a,t,g, or c
  SITE (350): n equals a,t,g, or c
  SITE (356): n equals a,t,g, or c
  SITE (372): n equals a,t,g, or c
  SITE (375): n equals a,t,g, or c
  SITE (379): n equals a,t,g, or c
  SITE (391): n equals a,t,g, or c
  SITE (399): n equals a,t,g, or c
cagcgcccgcgggctccacagcacctccagcccgggcagggacgcgggtggacccagcaggcgcgcggggcccgaacgggccgccaggagcatggtggaacatggtggcgggcagcancngtancananccgcggcgcctgcgggaagggccatcangtcgggcgtccgcccctanccccccanctccccgccggcccgcacgggcgccctgacntctctgcgggaccctctcggcattcccanagtgcgcctccgcaccccgtcctcanccctcggcccccangcaccccgctgcctcccanttcccttcccangcgtccatcttantcccccgcccccangcccctcnaaaacnctcctcctgctcccantcnacancataaatccccnttctgcancccccaaaaaccggcccctcctcagctctccctctccagacacccttcgctgcaaacccccgggtccctctgcctccgacacccccaaagccttccatcctcagatctcgcccccgctcttagttcacccgctccagctctccttcgcttagcctttgccccaggtcccatctctctgccccattacccaggggccctccgaattccagcggggcccgggggccctgagtgggggccatggtctccgctccgccggagagagagggcgctcacaatagtcagtcaaggaaacactgtccgccccatttcccaagagatggactcggccgcgcggaagatccggccccgcggcgcctgcacctgcctgg

SEQ ID NO: 10159 - DNA, 473 bp, Homo sapiens
tcccaaagcaggcgttactcacatactccccgtaaccccctaaccctggtgcccaggagagccggccctcagaattagtccagatccgaagcaggccgcaggtgcttagccagctgccaccactgtgcctcaactgctccatcagaccacaagcagccaaggcagggaccgctggctcccaagcgcatctgcgtgtccagcgcactgcctggatgaggcaatacattcttgttgaccctcatctcctttccagacctcccaaagcctttcacatgctttccggaacatgggctgtcttctctgaagggccctttccctttggtcctgatagaatcctgcctagggaggctgtttttcctttcacacaccaggtgcctgggagcctggtcccttcatgcttctaaatcatgcctagatctcctctcttcaaaaccccggcttctaggaagaccatgccatcaagccacaaccct

SEQ ID NO: 10160 - DNA, 1412 bp, Homo sapiens
tttccgggagcgcccccagaggcagccccgctgacatccccagccccaccaacagggctgtcagcaccagggcctggaagcctgaaccacagcgcacagtgagccctggggtgcgcgcctccacatccccaccccgcaaacacacgcagagcccaaaactcagggggccacagaccctgccccaagcattaggctgccaccctggccttcagaggatcaccccagccactgctgtggtgcacggagtagcagtaaatggggtaaggctgtggggacgaggggcatagggagagcccccggcgtctgtcctgggcgtaacagaggcacacaaaggagcctggggtgggggccaatctccgtggacctccccgctaggcctggagctccacccccggccgcttaactccagcgcgagggcccgtcccctaggcaccgttaataggatagcgcaggcgactcttgtccttcaattcctgcccctcggccacctgcgggtccaagggggctctgataaggcccggggcgtcctttccctcgccgagcccattcgcttccctcccccgagcgtcgcgaggcgggcccgcaccttgcgcgccggcagtaggtagagcgccgcctgcaggccgagccaggcgagccacagcagcagcgcccgtgggctccacagcacctccagccccggcagggacgcgggtggacccagcaggcgcgcggggcccgaacgggccgccaggagcaggtggaacatggtggcgggcagcagcagtagcagagccgcggcgcctgcgggaagggccatcacgtcgggcgtccgcccctagccccccagctccccgccggcccgcacgggcgccctgacgtctctgcgggaccctctcggcattcccagagtgcgcctccgcaccccgtcctcagccctcggcccccaggcaccccgctgcctcccagttcccttcccaggcgtccatcttagtcccccgcccccaggcccctcgaagaccctcctcctgctcccagtcgacaccataaatccccgttctgcagcccccagaaccggcccctcctcagctctccctctccagacacccttcgctgcaaacccccgggtccctctgcctccgacacccccaaagccttccatcctcagatctcgcccccgctcttagttcacccgctccagctctccttcgcttagcctttgccccaggtcccatctctctgccccattacccaggggccctccgaattccagcggggcccggggccctgagtgggggccatggtctccgctccgccggagagagagggcgctcacaatagtcagtcaaggaaacactgtccgccccatttcccaggagatggactcggccgcgcggaggatccggccccgcggcgcctgcacctgcctggac

SEQ ID NO: 10161 - DNA, 757 bp, Homo sapiens
aaaatgttcagagacaatggaatggaatctattaggcaagaacaggacattatgaaataaggacaggtggacttccaaaaacacaagtagaaattctaacaatgaaatatattacaggcaggtcacccactaaccaaacaactgaagcgagagctggtggtcttgcttggtctcacagtgggcacagcggtaggcggtcagtcatgttgctgaacgacggagggtaaactccccagccccaaggaaacctgtgttggaagtaacaacaacctccctgctcctggcaccagccgttttggtcatggtgggccagctgcaaagcgtcttccattctctgggcagtggtggccccgaggctgtggcctctcagggggtttctgtggacacgggcagcagagtgtgtccaggccagcccccaagaatgccctgctcctgacagcttggccaacccctggtcagggcagagggagttgggtgggtcaggctctgggctcacctccatctccagagcatcccctgcctgcagttgtggcaagaacgcccagctcagaatgaacacaccccaccaagagcctccttgttcataaccacaggttaccctacaaaccactgtccccacacaaccctggggatgttttaaaacacacacctctaacgcatatcttacagtcactgttgtcttgcctgagggttgaattttttttaatgaaagtgcaatgaaaatcactggattaaatcctacggacacagagctgaa

SEQ ID NO: 10162 - DNA, 757 bp, Homo sapiens
aaaatgttcagagaaaatggaatggaatctattaggcaagaacaggacattatgaaataaggacaggtggacttccaaaagcacaagtagaaattctaacaatgaaaaatattacaggcagatcacccactaaccaaacaactgaagcgagagctggtggtcttgcttggtctcacagtgggcacagcggtaggcggtcagtcatgttgctgaacgacggagggtaaactccccagccccaaggaaacctgtgttggaagtaacaacaacctccctgctcctggcaccagccgttttggtcatggtgggccagctgcaaagcgtcttccattctctgggcagtggtggccccgaggctgtggcctctcagggggtttctgtggacacgggcagcagagtgtgtccaggccagcccccaagaatgccctgctcctgacagcttggccaacgcctagtcagggcagaggggatcgggtgggtcaggctctgggctcacctccatctccagagcatcccctgcctgcagttgtggcaagaacgcccagctcagaatgaacacaccccaccaagagcctccttgttcataaccacaggttaccctacaaaccactgtccccacacaaccctggggatgttttaaaacacacacctctaacgcacatcttacagtcactgttgtcttgcctgagggttgaattttttttaatgaaagtgcaatgaaaatcactggattaaatcctacggacacagagctgaa

SEQ ID NO: 10163 - DNA, 757 bp, Homo sapiens; identical to SEQ ID NO: 10161

SEQ ID NO: 10164 - DNA, 424 bp, Homo sapiens
gcacccgtcagcaggtgctggacacagtggctctcccttgtctccccagatgtcaagaatatgaacacgtggctgctgttcctccccctgttcccggtgcaggtgcagaccctgatagtcgtgatcatcgggatgctcgtgctcctgctggactttcttggcttggtgcacctgggccagctgctcatcttccacatctacctgagtatgtcccccaccctaagcccccgatccccccaaggctgggtggtcagagctgctcatcttacacctctacttgagtatgtccctaaccctgagccccccacgcctggggccagagtctttgtcccccgtgtgcgcatgtgttcagggtcagcctctcccagaagtgagatcatggacaaaaagggcaaatcacaggaagaaattaaatccatgagga

SEQ ID NO: 10165 - DNA, 416 bp, Homo sapiens
actgtgtgctgagcacgtggggtgctgcaggcccttgtgctgcagagaagctggcccttgcctcaggcggcagagcagggaagtgcagtgggcctgaagccatgcggggctgggagggatgacctggtctgtcctctgagccaggcactgcacttggaatgggcttcttgaacgcaaagcccagaccaagtgtggcagaaacatgaaaggacaggcagtcggctgctgtgggcgggaggcaggacgcccaggcctgtccccacccccgtgacccagagcctcctgggcagtgactccaggatgtccaggagcttcttctctacctcacaggactggagaggctgtggtgagacgcatcctgtgaaggctgggctggccacaggcagctccccagggcgcccaccgccatctgctcc

SEQ ID NO: 10166 - DNA, 1186 bp, Homo sapiens
tgccattctgccttgcctggccctctgccattctgcattacgcctgatttttggaagtgttgtggttttgagtgttggcagcccagtgtcacagaggaccatatcttagaaatgaccccaggtgagagctgtggctttcctgttctatttgaaggcggctgttttagggtgcagagggtccagggacacagcgtgggccatgaggaagggatggatgctgggactcggcagagccagcaggcgctgtgaccctggtacttagtgaggaaggggtgggtgctgtgacctcggtacttaatgaggaaggggtgggcactgtgaccctggcacttagtgaggaaggggtgggcactgtgaccccagcacttagtgaggaaggggtgggtgctgtgaccccagcacttaggaaggggtaggcactgtgaccccggcacttagtgaggaaggggtgggcgctgtgaccccagcacttaggaaggggtgggcactgtgaccccggcacttagtgaggaagaggtgggccctgtgaccccagaacttaggaaggggtggatgctggagccctggcacttagtgaccctgttggagcgtcacctcccagatccataaagcagggatcatgaaaaccaacctcagtcagcagggcccatggggcactcaggtaaggaaggtgtccaccagggcagggaggcatccctcgtgctggctgtctccacgccgccccatccccagcaagctctggtctgtgacatccacctgatgtggcacccgtcagcaggtgctggacacagtgtctctcccttgtctccccagatgtcaagaatatgaacacgtggctgctgttcctccccctgttcccggtgcaggtgcagactctgatagtcgtgatcatcaggatgctcgtgctcctgctggaccttcttggcttggtgcagctgggccagctgctcatcttccacatctacctgagtatgtcccccaccctaagcccccgatccccccaagcctggttggtcagagctgctcatcgttacacctctacttgagtatgtccctaaccctgagccccccacacctggggccagagtctttgtcccccgtgtgcgcatgtgttcagggtcagcctctcccagaagtgagatcatggacaaaaagggcaaatcacaggaagaaattaaatccatga

SEQ ID NO: 10167 - DNA, 424 bp, Homo sapiens
gcacccgtcagcaggtgctggacacagtggctctcccttgtctccccagatgtcaagaatatgaacacgtggctgctgttcctccccctgttcccggtgcaggtgcagaccctgatagtcgtgatcatcgggatgctcgtgctcctgctggactttcttggcttggtgcacctgggccagctgctcatcttccacatctacctgagtatgtcccccaccctaagcccccgatccccccaaggctgggtggtcagagctgctcatcttacacctctacttgagtatgtcgctaaccctgagccccccacgcctggggccagagtctttgtcccccgtgtgcgcatgtgttcagggtcagcctctcccagaagtgagatcatggacaaaaagggcaaatcacaggaagaaattaaatccatgagga

SEQ ID NO: 10168 - DNA, 411 bp, Homo sapiens
gtgtggctggcccttgtgctgcagagaagctggcccttgcctcaggtggcagagcagggaagtgcagtgggcctgaagccatgcggggctgggagggatgacctggtctgtcctctgagccaggcactgcacttggaacgggcttcttgaacgcaaagcccagaccaagtgtggcagaaacatgaaaggacaggcaggcggctgctgtgggcaggaggcaggatgcctggaagcaggacgcccaggcctgtccccacccccgtgacccagagcctccctgggcagtgactccgggatgtccaggagcttcttctctacctcacaggactggaggggctgtggtgagacgcatcctgtgagggctgggctggccacaggcagctccccagggtgcccaccgccatctgctcc

SEQ ID NO: 10169 - DNA, 417 bp, Homo sapiens
actgtgtgctgagcacgtggggtgctgcaggcccttgtgctgcagagaagctggcccttgcctcaggcggcagagcagggaagtgcagtgggcctgaagccatgcggggctgggagggatgacctggtctgtcctctgagccaggcactgcacttggaatgggcttcttgaacgcaaagcccagaccaagtgtggcagaaacatgaaaggacaggcagtcggctgctgtgggcgggaggcaggacgcccaggcctgtccccacccccgtgacccagagcctccctgggcagtgactccaggatgtccaggagcttcttctctacctcacaggactggagaggctgtggtgagacgcatcctgtgaaggctgggctggccacaggcagctccccagggcgcccaccgccatctgctcc

SEQ ID NO: 10170 - DNA, 5660 bp, Homo sapiens
gctgctccattcacgttttttactaaagcacccacacaagtttctgtgcaatgtacaaacacaagccggccctggggctcctgcctcctctctcagacagggaggcgggaaccagacttactgatccaagccccacctgcctcccatgcaaaggccaaccccaagatcccaggcagcgacacagcatcccctctggtcccctcctggggctgctcctcagcagggggcgcaccaaagcttgccccctacaatgttgaatgaaaaaggtttcccctcccctgggagcaagggggttcccaagagctgagaattccccctggaagagacactgccccctagacatacctcccacccttccaggccctaggggactcaagggggggaaactgaggcacagagaggtggagtgacctagcccaggccactctgcgaggcagtgcaggggctggcccgaccctgacagtgactggggctgggctagggggagggggtcgggaaggagggttgactccaaagagggccacacttgaagagcctgcccaggcaggaggccccccaaagtgggttctgaaacttccaggtgtagctagggggcctagtgaagacccttggaaaacagagcccagtctcagtcctggaggtcctccacagagcagctgccagccaggctgtggtcagtcctctggcaggcaatcttcggcaccgagagcctctgtccattagtgtcagccccgagggggccacgacggaggccgcccaatgtccactgtgatattggtgaagagtggttgccgagacacctccaagacctggtaccgcactgacccaatgccgtcccgcttcatggtcagcttcgtgttttgaatcttggtaaacctagataggatggaaatggtccacatcagggctaacaactgtaaactaaaaataaaatcctacaccccccaaccaactaaatggacccccttttggccaaggggaccccagggaaccttaaaaacagggtttccagctatgatgggaagggacgtcaaacatgccatgttatgcccacgcccttttgcagcttagacacaacaaatgaccagcattaacgtcaaagcagagatcacaagactgacagaatgcattgtttgtgtcaataagatacctaattataaataggatctaaggccatgccaggcaagggttaagtcttgcacctctgcacttaaagaagagactatgctctaactgccgcgaggattttctttttctgtagcagctaaacaagtacaggacttgagataaccaatattaaaacaatttgtataatgtggtaatataaataatagaaaaaaatttgcagctcacccactgccagatgctgacccctacgcccctgttccacaagccataattatagctttggtgggacaagagactgatctcagtaactttctcctgataagaccatcggccatggactggttctagccagcttacagaggctgcgcacttgagtgcttttgtctttttgacgtatggggcctaactgcgatatatttaaatattaagtctccaccccaaggtgaacatggatggtatataacatgcatgtttgttcgatatgcatatgtcaggaccccctccgtaaatattcatagctcctccagtaacctgttgaccaatccattcaactaaaattcctatctcactcctccctccctcaaagtgcctgttaaggctttggctggaggctctgcttcctagccagtgggatggccagcctgcaggttgtaaccctttataaaagagaaataaagtctccttttcaaatttattgatctagtgatttttttttttttttttttgagacagagtacaatggcaccacctcggctcactgcaccctccacttcccaggttcaagcgattctcctgcctcagccttctgagtagctgggattacagatgcctgccactgcgccagctgatttttgtatttttagtagagatggggtttcaccatgttggtcaggctggtctcgaactcctaacctcaggtgatccacccgccttgactacccaaagtgctgggattataggcatgagccacctcatccagctgatctagtgatttttaagttaacaccaccaaacccaatatgggatctctggggcctaggcttaagccaatctggctccttccagggttgatttggcaggagcccttctgctcctgcattggccctcaaaacagagatgtcagctgctccagtcagaaaacagacgtctgacaccctcacaaatctctcagctcagactttttttttttttttttttttgagacagagtcttgctctgttgcctaggctggaatatagtggcgcggtctcggctcactgcaacctctgcctcctgggttcaagcgattctcctgccttagcctcctgagtagctgagactacaggtgcacaccaccacgtccggctttttgttttggttttttgagacgctctcttttttgagagtcttgctctgttgcccaggatggagtacagtagtgcagtctcagctcactgcaacctctgcctcctgggttcaagaggttgcctcccaacctcctgcctcagcctcccgagtaggtgggattacaggcgcccaccaccacacccagctaatttttttggtatttttagtagagatggggttcaccattttggccaggctggtctcgaactactgacctcaggtgatctgcccacattggcctcccaaagtgcagggattacaggcatgagccaccgtgccccgtctttttttttttttttttttgtatttttggtagagacaaggtttcactatgtcggccaggctggtctcgagctcctaacctcaagtgatctgcctgcctcagtctcccaaagtgctgggattacagacatgagccacggtgtgaggtcagctcagacctttctaagcctgagaccaggcatcccacaggcacttcaagcgcaatcagatgcatcatttttactccccacgcctgtgccattttctctgttcctcgttctttagtgactctcttgccagctatttattgagcaccaccatgtgccaggctgtgctctaagcaccaaggctactgccatggccatgacaggtggggtccttcatctcagggcaagttggcttctctaggggaggcaggtaacagagaaaacatcggagtgctaagagagacaagagggcatatgtgacactgagctaagggcaggggcaaagcactccaggtagaggtcagagcacatggtgaccctaaattgggaataagattttgcacagctgagtggctaaacctgaatggggcacgtggaaaagcagaatattagcttggaggttcaagtacaccgtgcaagggcagggctctaagtcagagcgagcagctcatgttttcattctcacagaatgaaatgtgtaaaggctctgagaaatgtttaacccagttgggggccaagccataaacagggaaaccagttggaggccactgcagtagtccaggcaggatcccagaggttggactaaggtaaaggtagtaaagggggaaagcaaatggactcaaatatgttttaggggtggcagtgatattactcgctgatgggtttggatatgtagggtgaggaaaagaagaatccagaactcccagattttaggcaacagcaactaggtagagagagttcacagtttgtgaactctgtgaatctggtatcaggctggctgggagaagggcctaaagggtgtgtgaaatgtaaacaagggcttcctgacgctgctctgtgacttgtgctaaactttctgggggtggcagacccagagtagtcatacccaatccatgaatccaacattcacagagttctttaagccagaaacttcttgctatcttgccacatctacaaccaagccagacatgtgtaattgatggtggcactcaggcaggctactcctgaaacaggaccaaggctcctggcgtgtactgtggagctccactcctccccagatgccctgaagcccctctcctcttggtctcttacctgtttcctgctgaccatagttttcatcagaaccactttttcatcagctccctgtgcctccccagtgcctcatgcttctcccaggcaccaaccccacaccagggctacaaaccacctcccccactcctaccccgtgttcagagtagaaaaaccctcctgctcaagctggggacacagcacctccatccccaggccctgtaccactatgctcccttggactccatcgattccttcaggccgggctgactttctctcctgctccacccagcggctatgccaggctttcgccttcctgaagctcaaacagtgtgccttctaaacacaaaccccaccccgcctctcccttcttcaggttcttccatgactccccagtcctctgggacaaaagttaacctcccatcaggtattcaagacccctgacatgtacatggtgaaagggcaacagaagaaaaacccctaacatccagacgtgactttcccccgccccactgtcactatcagccttcagagatcttaaaaccaaatagtttcagactctcggtatgtatcatacatgttcacattccagaatcttccagatatgattctccttatccaggctggcttcctctattagcctggggaatgtagcactgtgcccaaggtaggtgtgaggcaaatatttgttaaatgagtaactatttcaaactccaggttaccatcacctcctccaggaaggcttccatcaccagtccctcttctgccaagacaacaccttgccttgatgaccttgtgctataactgcctttttccatgactatctccctgcctggaatgaacttcgtaagggaaagcacggattgggtgtgactactctgggtctcccacccccagaaagtttagcacaagtcagagcagtgtcaggaagcccttgtttacatttcacacaccctttaggcccttctcccagccagcctgataccaaatgtggctacctcctaagagatacatccacctccttcaatttcagaggggtgggcactgtctttccacacccccttcccatactgctcaggtcccctttgtcaggtccacaggagctgtgcccagcacccattagctcgtgtcctatctgccccggcaggggtcccacaggtgcacaagtgaggtcttcgagggcaccaataggaatgcaatctactcaatgactatttaggccctgacattaaattctggtcacctctaggaatcaggccagaggtcagagatattgggctgaggctgggctgggggttgggggacaacgatcaggggtgccagcagtcctgaggggccttggatcacatcagggaatcagtggcactgggagtcacctttttggagtcaaggatgcttggaggtcccccactgggggatcagggattgggccacttggggtcaagagttggggatattgggaagttgcctctggggagtaaggggtgagggtgctggggtcacctctgagggttaggttcgttatgcttgtcgcggtcgtgcttgatcatgcggtagcggccgattcggatgtctggtgcgtgagatcttcatccctagtcagggagatcc

SEQ ID NO: 10171 - DNA, 5660 bp, Homo sapiens
gctgctccattcacgttttttactaaagcacccacacaagtttctgtgcaatgtacaaacacaagccggccctggggctcctgcctcctctctcagacagggaggcgggaaccagacttactgatccaagccccacctgcctcccatgcaaaggccaaccccaagatcccaggcagcgacacagcatcccctctggtcccctcctggggctgctcctcagcagggggcgcaccaaagcttgccccctacaatgttgaatgaaaaaggtttcccctcccctgggagcaagggggttcccaagagctgagaattccccctggaagagacactgccccctagacatacctcccacccttccaggccctagggactcaagggggggaaactgaggcacagagaggtggagtgacctagcccaggccactctgcgaggcagtgcaggggctggcccgaccctgacagtgactggggctgggctagggggagggggtcggaaaggagggttgactccaaagagggccacacttgaagagcctgcccaggcaggaggccccccaaagtgggttctgaaacttccaggtgtagctagggggcctagtgaagacccttggaaaacagagcccagtctcagtcctggaggtcctccacagagcagctgccagccaggctgtggtcagtcctctggcaggcaatcttcggcaccgagagcctctgtccattagtgtcagccccgagggggccacgacggaggccgcccaatgtccactgtgatattggtgaagagtggttgccgagacacctccaagacctggtaccgcactgacccaatgccgtcccgcttcatggtcagcttcgtgttttgaatcttggtaaacctagataggatggaaatggtccacatcagggctaacaactgtaaactaaaaataaaatcctacaccccccaaccaactaaatggacccccttttggccaaggggaccccagggaaccttaaaaacagggtttccagctatgatgggaagggacgtcaaacatgccatgttatgcccacgcccttttgcagcttagacacaacaaatgaccagcattaacgtcaaagcagagatcacaagactgacagaatgcattgtttgtgtcaataagatacctaattataaataggatctaaggccatgccaggcaagggttaagtcttgcacctctgcacttaaagaagagactatgctctaactgccgcgaggattttctttttctgtagcagctaaacaagtacaggacttgagataaccaatattaaaacaatttgtataatgtggtaatataaataatagaaaaaaatttgcagctcacccactgccagatgctgacccctacgcccctgttccacaagccataattatagctttggtgggacaagagactgatctcagtaactttctcctgataagaccatcggccatggactggttctagccagcttacagaggctgcgcacttgagtgcttttgtctttttgacgtatggggcctaactgcgatatatttaaatattaagtctccaccccaaggtgaacatggatggtatataacatgcatgtttgttcgatatgcatatgtcaggaccccctccgtaaatattcatagctcctccagtaacctgttgaccaatccattcaactaaaattcctatctcactcctccctccctcaaagtgcctgttaaggctttggctggaggctctgcttcctagccagtgggatggccagcctgcaggttgtaaccctttataaaagagaaataaagtctccttttcaaatttattgatctagtgattttttttttttttttttttttgagacagagtacaatggcaccacctcggctcactgcaccctccacttcccaggttcaagcgattctcctgcctcagccttctgagtagctgggattacagatgcctgccactgcgccagctgatttttgtatttttagtagagatggggtttcaccatgttggtcaggctggtctcgaactcctaacctcaggtgatccacccgccttgactacccaaagtgctgggattataggcatgagccacctcatccagctgatctagtgatttttaagttaacaccaccaaacccaatatgggatctctggggcctaggcttaagccaatctggctccttccagggttgatttggcaggagcccttctgctcctgcattggccctcaaaacagagatgtcagctgctccagtcagaaaacagacgtctgacaccctcacaaatctctcagctcagactttttttttttttttttttttgagacagagtcttgctctgttgcctaggctggaatatagtggcgcggtctcggctcactgcaacctctgcctcctgggttcaagcgattctcctgccttagcctcctgagtagctgagactacaggtgcacaccaccacgtccggctttttgttttggttttttgagacgctctcttttttgagagtcttgctctgttgcccaggatggagtacagtagtgcagtctcagctcactgcaacctctgcctcctgggttcaagaggttgcctcccaacctcctgcctcagcctcccgagtaggtgggattacaggcgcccaccaccacacccagctaatttttttggtatttttagtagagatggggttcaccattttggccaggctggtctcgaactactgacctcaggtgatctgcccacattggcctcccaaagtgcagggattacaggcatgagccaccgtgccccgtctttttttttttttttttttgtatttttggtagagacaaggtttcactatgtcggccaggctggtctcgagctcctaacctcaagtgatctgcctgcctcagtctcccaaagtgctgggattacagacatgagccacggtgtgaggtcagctcagacctttctaagcctgagaccaggcatcccacaggcacttcaagcgcaatcagatgcatcatttttactccccacgcctgtgccattttctctgttcctcgttctttagtgactctcttgccagctatttattgagcaccaccatgtgccaggctgtgctctaagcaccaaggctactgccatggccatgacaggtggggtccttcatctcagggcaagttggcttctctaggggaggcaggtaacagagaaaacatcggagtgctaagagagacaagagggcatatgtgacactgagctaagggcaggggcaaagcactccaggtagaggtcagagcacatggtgaccctaaattgggaataagattttgcacagctgagtggctaaacctgaatggggcacgtggaaaagcagaatattagcttggaggttcaagtacaccgtgcaagggcagggctctaagtcagagcgagcagctcatgttttcattctcacagaatgaaatgtgtaaaggctctgagaaatgtttaacccagttgggggccaagccataaacagggaaaccagttggaggccactgcagtagtccaggcaggatcccagaggttggactaaggtaaaggtagtaaagggggaaagcaaatggactcaaatatgttttaggggtggcagtgatattactcgctgatgggtttggatatgtagggtgaggaaaagaagaatccagaactcccagattttaggcaacagcaactaggtagagagagttcacagtttgtgaactctgtgaatctggtatcaggctggctgggagaagggcctaaagggtgtgtgaaatgtaaacaagggcttcctgacgctgctctgtgacttgtgctaaactttctgggggtggcagacccagagtagtcatacccaatccatgaatccaacattcacagagttctttaagccagaaacttcttgctatcttgccacatctacaaccaagccagacatgtgtaattgatggtggcactcaggcaggctactcctgaaacaggaccaaggctcctggcgtgtactgtggagctccactcctccccagatgccctgaagcccctctcctcttggtctcttacctgtttcctgctgaccatagttttcatcagaaccactttttcatcagctccctgtgcctccccagtgcctcatgcttctcccaggcaccaaccccacaccagggctacaaaccacctcccccactcctaccccgtgttcagagtagaaaaaccctcctgctcaagctggggacacagcacctccatccccaggccctgtaccactatgctcccttggactccatcgattccttcaggccgggctgactttctctcctgctccacccagcggctatgccaggctttcgccttcctgaagctcaaacagtgtgccttctaaacacaaaccccaccccgcctctcccttcttcaggttcttccatgactccccagtcctctgggacaaaagttaacctcccatcaggtattcaagacccctgacatgtacatggtgaaagggcaacagaagaaaaacccctaacatccagacgtgactttcccccgccccactgtcactatcagccttcagagatcttaaaaccaaatagtttcagactctcggtatgtatcatacatgttcacattccagaatcttccagatatgattctccttatccaggctggcttcctctattagcctggggaatgtagcactgtgcccaaggtaggtgtgaggcaaatatttgttaaatgagtaactatttcaaactccaggttaccatcacctcctccaggaaggcttccatcaccagtccctcttctgccaagacaacaccttgccttgatgacttgtgctataactgctttttccatgactatctccctgcctggaatgaacttcgtaagggaaagcacggattgggtgtgactactctgggtctcccacccccagaaagtttagcacaagtcagagcagtgtcaggaagcccttgtttacatttcacacaccctttaggcccttctcccagccagcctgataccaaatgtggctacctcctaagagatacatccacctccttcaatttcagaggggtgggcactgtctttccacacccccttcccatactgctcaggtcccctttgtcaggtccacaggagctgtgcccagcacccattagctcgtgtcctatctgccccggcaggggtcccacaggtgcacaagtgaggtcttcgagggcaccaataggaatgcaatctactcaatgactatttaggccctgacattaaattctggtcacctctaggaatcaggccagaggtcagagatattgggctgaggctgggctgggggttgggggacaacgatcaggggtgccagcagtcctgaggggccttggatcacatcagggaatcagtggcactgggagtcacctttttggagtcaaggatgcttggaggtcccccactgggggatcagggattgggccacttggggtcaagagttggggatattgggaagttgcctctggggagtaaggggtgagggtgctggggtcacctctgagggttaggttcgttatgcttgtcgcggtcgtgcttgatcatgcggtagcggccgattcggatgtctggtgcgtgagatcttcatccctagtcagggagatcc

SEQ ID NO: 10172 - DNA, 11809 bp, Homo sapiens
gctgctccattcacgttttttactaaagcacccacacaagtttctgtgcaatgtacaaacacaagccggccctggggctcctgcctcctctctcagacagggaggcgggaaccagacttactgatccaagccccacctgcctcccatgcaaaggccaaccccaagatcccaggcagcgacacagcatcccctctggtcccctcctggggctgctcctcagcagggggcgcaccaaagcttgccccctacaatgttgaatgaaaaaggtttcccctcccctgggagcaagggggttcccaagagctgagaattccccctggaagagacactgccccctagacatacctcccacccttccaggccctaggggactcaagggggggaaactgaggcacagagaggtggagtgacctagcccaggccactctgcgaggcagtgcaggggctggcccgaccctgacagtgactggggctgggctagggggagggggtcgggaaggagggttgactccaaagagggccacacttgaagagcctgcccaggcaggaggccccccaaagtgggttctgaaacttccaggtgtagctagggggcctagtgaagacccttggaaaacagagcccagtctcagtcctggaggtcctccacagagcagctgccagccaggctgtggtcagtcctctggcaggcaatcttcggcaccgagagcctctgtccattagtgtcagccccgagggggccacgacggaggccgcccaatgtccactgtgatattggtgaagagtggttgccgagacacctccaagacctggtaccgcactgacccaatgccgtcccgcttcatggtcagcttcgtgttttgaatcttggtaaacctagataggatggaaatggtccacatcagggctaacaactgtaaactaaaaataaaatcctacaccccccaaccaactaaatggacccccttttggccaaggggaccccagggaaccttaaaaacagggtttccagctatgatgggaagggacgtcaaacatgccatgttatgcccacgcccttttgcagcttagacacaacaaatgaccagcattaacgtcaaagcagagatcacaagactgacagaatgcattgtttgtgtcaataagatacctaattataaataggatctaaggccatgccaggcaagggttaagtcttgcacctctgcacttaaagaagagactatgctctaactgccgcgaggattttctttttctgtagcagctaaacaagtacaggacttgagataaccaatattaaaacaatttgtataatgtggtaatataaataatagaaaaaaatttgcagctcacccactgccagatgctgacccctacgcccctgttccacaagccataattatagctttggtgggacaagagactgatctcagtaactttctcctgataagaccatcggccatggactggttctagccagcttacagaggctgcgcacttgagtgcttttgtctttttgacgtatggggcctaactgcgatatatttaaatattaagtctccaccccaaggtgaacatggatggtatataacatgcatgtttgttcgatatgcatatgtcaggaccccctccgtaaatattcatagctcctccagtaacctgttgaccaatccattcaactaaaattcctatctcactcctccctccctcaaagtgcctgttaaggctttggctggaggctctgcttcctagccagtgggatggccagcctgcaggttgtaaccctttataaaagagaaataaagtctccttttcaaatttattgatctagtgattttttttttttttttttttttgagacagagtacaatggcaccacctcggctcactgcaccctccacttcccaggttcaagcgattctcctgcctcagccttctgagtagctgggattacagatgcctgccactgcgccagctgatttttgtatttttagtagagatggggtttcaccatgttggtcaggctggtctcgaactcctaacctcaggtgatccacccgccttgactacccaaagtgctgggattataggcatgagccacctcatccagctgatctagtgatttttaagttaacaccaccaaacccaatatgggatctctggggcctaggcttaagccaatctggctccttccagggttgatttggcaggagcccttctgctcctgcattggccctcaaaacagagatgtcagctgctccagtcagaaaacagacgtctgacaccctcacaaatctctcagctcagactttttttttttttttttttttgagacagagtcttgctctgttgcctaggctggaatatagtggcgcggtctcggctcactgcaacctctgcctcctgggttcaagcgattctcctgccttagcctcctgagtagctgagactacaggtgcacaccaccacgtccggctttttgttttggttttttgagacgctctcttttttgagagtcttgctctgttgcccaggatggagtacagtagtgcagtctcagctcactgcaacctctgcctcctgggttcaagaggttgcctcccaacctcctgcctcagcctcccgagtaggtgggattacaggcgcccaccaccacacccagctaatttttttggtatttttagtagagatggggttcaccattttggccaggctggtctcgaactactgacctcaggtgatctgcccacattggcctcccaaagtgcagggattacaggcatgagccaccgtgccccgtctttttttttttttttttttgtatttttggtagagacaaggtttcactatgtcggccaggctggtctcgagctcctaacctcaagtgatctgcctgcctcagtctcccaaagtgctgggattacagacatgagccacggtgtgaggtcagctcagacctttctaagcctgagaccaggcatcccacaggcacttcaagcgcaatcagatgcatcatttttactccccacgcctgtgccattttctctgttcctcgttctttagtgactctcttgccagctatttattgagcaccaccatgtgccaggctgtgctctaagcaccaaggctactgccatggccatgacaggtggggtccttcatctcagggcaagttggcttctctaggggaggcaggtaacagagaaaacatcggagtgctaagagagacaagagggcatatgtgacactgagctaagggcaggggcaaagcactccaggtagaggtcagagcacatggtgaccctaaattgggaataagattttgcacagctgagtggctaaacctgaatggggcacgtggaaaagcagaatattagcttggaggttcaagtacaccgtgcaagggcagggctctaagtcagagcgagcagctcatgttttcattctcacagaatgaaatgtgtaaaggctctgagaaatgtttaacccagttgggggccaagccataaacagggaaaccagttggaggccactgcagtagtccaggcaggatcccagaggttggactaaggtaaaggtagtaaagggggaaagcaaatggactcaaatatgttttaggggtggcagtgatattactcgctgatgggtttggatatgtagggtgaggaaaagaagaatccagaactcccagattttaggcaacagcaactaggtagagagagttcacagtttgtgaactctgtgaatctggtatcaggctggctgggagaagggcctaaagggtgtgtgaaatgtaaacaagggcttcctgacgctgctctgtgacttgtgctaaactttctgggggtggcagacccagagtagtcatacccaatccatgaatccaacattcacagagttctttaagccagaaacttcttgctatcttgccacatctacaaccaagccagacatgtgtaattgatggtggcactcaggcaggctactcctgaaacaggaccaaggctcctggcgtgtactgtggagctccactcctccccagatgccctgaagcccctctcctcttggtctcttacctgtttcctgctgaccatagttttcatcagaaccactttttcatcagctccctgtgcctccccagtgcctcatgcttctcccaggcaccaaccccacaccagggctacaaaccacctcccccactcctaccccgtgttcagagtagaaaaaccctcctgctcaagctggggacacagcacctccatccccaggccctgtaccactatgctcccttggactccatcgattccttcaggccgggctgactttctctcctgctccacccagcggctatgccaggctttcgccttcctgaagctcaaacagtgtgccttctaaacacaaaccccaccccgcctctcccttcttcaggttcttccatgactccccagtcctctgggacaaaagttaacctcccatcaggtattcaagacccctgacatgtacatggtgaaagggcaacagaagaaaaacccctaacatccagacgtgactttcccccgccccactgtcactatcagccttcagagatcttaaaaccaaatagtttcagactctcggtatgtatcatacatgttcacattccagaatcttccagatatgattctccttatccaggctggcttcctctattagcctggggaatgtagcactgtgcccaaggtaggtgtgaggcaaatatttgttaaatgagtaactatttcaaactccaggttaccatcacctcctccaggaaggcttccatcaccagtccctcttctgccaagacaacaccttgccttgatgaccttgtgctataactgcctttttccatgactatctccctgcctggaatgaacttcgtaagggaaagcacggattgggtgtgactactctgggtctcccacccccagaaagtttagcacaagtcagagcagtgtcaggaagcccttgtttacatttcacacaccctttaggcccttctcccagccagcctgataccaaatgtggctacctcctaagagatacatccacctccttcaatttcagaggggtgggcactgtctttccacacccccttcccatactgctcaggtcccctttgtcaggtccacaggagctgtgcccagcacccattagctcgtgtcctatctgccccggcaggggtcccacaggtgcacaagtgaggtcttcgagggcaccaataggaatgcaatctactcaatgactatttaggccctgacattaaattctggtcacctctaggaatcaggccagaggtcagagatattgggctgaggctgggctgggggttgggggacaacgatcaggggtgccagcagtcctgaggggccttggatcacatcagggaatcagtggcactgggagtcacctttttggagtcaaggatgcttggaggtcccccactgggggatcagggattgggccacttggggtcaagagttggggatattgggaagttgcctctggggagtaaggggtgagggtgctggggtcacctctgagggttaggttcgttatgcttgtcgcggtcgtgcttgatcatgcggtagcggccgattcggatgtctgggcgtgagatcttcatcccagtcagggagatcctgaggatggggacggacagactggaacaggctccaggaagggcaaagaaccccacccagtctgaaccccccccccccccccacccagcctattccccaccgcgtgcttactcaccggttgaagatgtcatcatcctcgccaccccagccccagtactcattggggaagccattgattctcagaaactgagccttactcaggcctgacacacctccaaagtagccagcatagggaagcctgtggcatgggaaggcaggtgtcagtaagggtcccaaggggactccaggggaaggaccagagaccaggtcggggggaatgtccaatggggtccagggaggatccagcctcgccagtggggtctgggccacagccaggagcaagcggggctcgggggctggaagtgggcctgcgtctggtgggggcaggagggctgggtccagctgagaagacagccctcaccggaagccaaacttgtccatggcaatggcaaagtggcggggttggtcgccgcagcggtataggttgcggtcatccatggggaccaggtccacatcgctgaagatgaagcagtcataggcggcatcctccttcagcgcctctaggaagcccacgttaagcagcttggcccggttgaaggtgtcctcaccatgctgggtagggggaggagcaggtcaaccctgggcctgtgaccaacaagcacctgcccttttgccactctccagagcagtctctggggatctaccagccccctcgctgcatggctcctccaggctctcaggatctagtccagcttctcgaccgggatctggcctacaaaggcctttcatatgtggctccagcctcctctctggccactgccctcaggtcccgaggcccagccacacaacatccctcagcagccccggaatatgccagactcttccttgcctccaggccttggggttagcagtacctgtgcttgtcacactcagggctggagcggctcccctgaccacacttccccaccccagtacgcttattccttccttcccatgggcttcctttatgccaatacccattgacaacgtcaggtggagttctcatctcattcactcattcaaacatgccctgtggcgctctctcctttgtgctagcggggattctggagatggccagccctggtcccctccctgctgtgtatagagtcatgcagtgagacaaacaacgaatgccccaaatgaccagtgtctaagatgcaggagcctcaggctccctggagctgcatccggctgcctgggcagcctctgagaccaggacaggtctgggctagattcacttgtctctccaacaaaatgacaagcatagggtctataggcagtcacagcccagcaagcctggggtcccctgagaattggggctgcaggggtcctggccatgcaggcctaagcaccagactctggactaggactagcagggagcattcagtgggaggcgctgacccctgagcccctgccccaacctgcagtctccaggctagaaccagaaaggttcctggagaggggatcggtgagtggcctttctggaatgagcggagagaaaggccctcttctccaccagcaaagccactgccagaagaggtgggagctgctcccctcgggaaccctgacctgcccagccctgccagctctcttctctccctctcctgcacctcctcttcccccagcccttggagagaccatcgctttcctcccagctcagcagcactccttctgacctctcaccagccaggagccctgtgtctctcccacatggctcataaacatgctcaatcctctcccaactgaaaaaacaaacctccctccagccaccaccctaccttttgccttcccttctcagcagggatttttttttaaagagttgtctctaattggttatttccatttcgtcaaatccgattccttcttcaacccactgcaatctgcttccgcccccaccatgcccctgaaatggctctcgctgggcccaccttgttgctaaatccactggacgagtcttggtccacatccctcctcacacccccacagtgcccatgcagctgccatgtctccttcctgacactgactgccgggtttccgggatcccacactcccctgggtctcctccagcccttctggccaagcctctcggcctctgtagcggcctctttctccctccatccctgaagtgctggcttcctcctctcatgccccttgctccctggcaggtcagacgttgttggttttagggaccagaccgtcttcatcctggtgctcccagatccctctctccactgcagacctcccttctgggtccagactcatttgtctaactgcctgctaaacatgtacttcccacaggcgctcaaactcatcacacgcaagaaaggattcagagtcacactcccccagagctggcccagctcctgtgtccccatctcactcagacacagccatccccacagccaacagccaaggcggaaacccttgcgctgtcctgacgtcgctcttttctcactctccactacttgcgtaacaaccccacttcttccccgcgactcccgccccacacatccgcagggtcaccgcctctttcctgggcatcgtcctctcttccaaacgggccacgctgtctctaatctcccctctccatccatgctccatatgcaaccagagtgacctttctacaaagcaaacacgcaagtcactctctccttacaaccttacatggtgccctgtcacttttgcgctggacttactgccagcatgcctcccaagacatttctcagtttgacttccaactcctccagcctcatctttgctacccagtccacatgctggacaccacacctcagccaatagttcgtgaacacgaggccagttatcttgctggccctgcatcctccaggtccctctgcctagaatgctggcttctgcagcccctgatgcctgctcatcccgcaagacccatctcagcaactgcttcccaaccccagggctggactggggccctctgtgctcccacggccccctgctccacctccacttgtgtcccatcatacgggagggacccatgtccaagtctaggaggtctctgtggtcggcgggggcgggggggcctgcatcagaggtcccttctgggacctagtggccagccctagccaggtccaccaaaggccttaagatgctgagctgagtgccctggcctcagctgtggctggcacctaccccaaagggttctacaggcttcatccttctttcagggtctaactccctctcctcagggccctcaacatctcctcctacagcatacccaaggcctgcaccaccatggggtgaggcctgccaagggtagagagtggggctcaaccccttctgagaccatgcacacacctgccagtgtgcatgccaacattcacatgcacacactgtgcgtacacattcctgtgcacactgacaaacaccgactacccacgcccaggtccatccacatatccacacgggcagacaaggacccacaaacgcccccaacccacatatatacaccaacaggcacatggacccccgcatgggcacctggttgatgacatagacgccgtagcgcagccgctgccgcctcaagatggggtgtagatagtggagccagtagcgcaggtggtgttcccggtgtctaaaggggatgatgaccgccaccgtctgggctggggtgcagtcgggcggtgtgtatcggccgcccatgagcacgcctgggttctccctctgcacccgctccaggggcatgggtgaggtgaactcgatcagcagtctgcccactgcagacaggacagtgtcaggaatcagggcattggccagaatccacagataccagcccccaccctcagcctgggggtgggctagggaaccccaagaatagccctcttacaacagacctggacccctggcacacccctgggtccagatgccatttctctagtcaaaccaataaaaccctgtttccccacaggcaggccctaccctccaggctcaccaagaccaggtggcgagtcaggacagggtggcagcgtgggagccgtgggaccgggcagggcactggggacctcagggagcccggagctagaggcggtggcgttgggccgggagcagttgctgctgctgctgctgctgctagcagctgggtggagggcatgggcagggcctcgggcactgaagcggctgaagaaggccaggtgctgggcgtagacgtcaaagtagaggatgacggccacgaggaagtgcagcaggcagagaaggagcacagccttgcagacgcgctccagcgtcccccccagcagtctgctcatcccgcaggcggccactggcccgcccagtgggcccgggcatccggctgctggcctgagcagggtgggagggaaacagatccagcaggtcagggcaggacaggcaaggctgcccacctacctcccactcagctgctcacactcgtgggccacacctcacactgacctgctcataccctttcacgctcacagactcaagaacttacctccaaacagacacccaggcacagttcccggcaactcagtactcacatcctcaagcacaccccactactaagccacatacatttaccttcctccacctcactgacacacacactcaggcactcacccttattgcacaactctacacacacactcacgcattcccaggaacacagacacgtgaactctaaccacactggtttgtacctaagcatggagacatgtttacctatagacccccatgtgcccctgtgcccctgagaacagacacctcacatggcagcatccttaacccagaactcatggcttggggaagagggaagagacggaatactgtgcacctaccatgcaggagcactttatactcatgacttcatttagtccttccaggagccatggtgggaagtggtttggtcattcagatcccagcgacaagcaggccaggccaactgggaccaggctgggaagttgccctcagcatccggggggcccaaatacagactggatgtttacagaatcccttcccactggagcaaaacgtcaaaatacggggcaaggcaggggacacccctcacttaagacctcaaagccagccccttgggactgggaccaagactctgggtcctgcccagcacagctggttctgattcccggaacgggatgcttgggcctggagatgggcacagcactgggcatggcaggaagggggtcttgcctgggcgatggctccagctgtggttccaagagagcggcagccacttctggcagtgcttcagggagcagggtgagtctcacaggcacacagaatcacagggacaccctggtcccagctggtcacccacactcagacacacagagaactacagtcacagacacacccgggtgacagtaacacactaagtcccacactcacaaacaaggccactgctcctggacttccacagccatacatccagactctcagacagctcacacccagacccacgtgcagacattcccaccctccctccggcgcaggggttctgggtcaggctggcggccaggctgaggggtgcgtttgggcggggctggcaggctgaacacgtggcacccgcggacgggcaggccgcacagaccgggtgggtgtggagcctgggggcagggggagtgggtggagggcagcggatgaggcaaaggccaaggggaaacgtgtatggaacgcctccccgcgccacgaggccggggcgagcgaggacaatgagggaggccggctggacgcgggcggagaagcccaggaggggcgccggagtgggggcggggtgggggcagccaggccggggtctggccgccggcgcctctctcaccggctcctgggttgggatctcggggccgcgctcggggtgcccctcgcggggctgggtctggaatctcggggccctgggtgggggccgcgcgcgccctcctctcacccggcgctcggggctcagcaggggacgccgctccgacttgggcagggctcccggctccggcggctgcggacggttccgtcccccatggcccggccccgccgcctcccgccgcccggtcagcggccaccgcggcccccgggtcgcc

SEQ ID NO: 10173 - DNA, 3378 bp, Homo sapiens
ctgacccagacaaataccaagtttatttcacaaacactaggaagatgggttgagggtggaggtgggggacacaggtgcgcagctgcacagagtcagcagcagcagcctgctccccgcactgaggactcggcctggactgcagtgcctccaaatcaacacgcagcaagaggggagtgcagggagggccctgaacaccaagcctctgaaaggctaagggacacagctccagctgtcccaggaaaaccagcaataaataaaagtgaggcacggccccacccacacatatcatctagtcacccatcttcactctggaggtctgcaaaaaaagaacaggagaaatcaggcagggacagaggaataggtaaggcagtgacaaatgatagaagatgacatctagcacatggttggatggacagaccacaagagatatatgactaaccaggatggacacactgtgacagacaaggcagacagggacagacaaccacagagttacgctgtgggacagatggagagaagtggcatatggataaagctagtcactaagaatcaactcagtcaagcacccacagtcacactcagaccctcaggctgatccttagtcacaaactcacacactgtcagacagactagacacacacaatttagacaatggtgtcctactgacaggcatgtgagagggagatacacatagctccgagagacagtcaaacacaccatgacagactgatatagacagacaaaattccattctagtctagatcacaaatacagactggagacatgaaaagcatggcagataaaatgagagaacagaaagagggaggactaagtgctatacagatacaacgcattagaaaggggggaaaaagaacagggctgttgtcagtgacaccaaatcagagacaaaaatagagagcccctgtaggagaaaaccagaagatggaaatgaggaggtggaagctgtttgggggaatctatagttataggtagagaaggagagcacttcagcttctccagaaggagggtaaggctaggctggggacaaggacacagaggcttcccaaggggattcatcacctgaagaattgcgacgatgaccccaaagaggccaatggcgctgccaaagatctccacgatgagaatctttacaaagaggctggggttctgagcatcggccagggcagccccactgcccacgatgcccacgcagactccacagaagaggttagacaggcctacggtgaggccagccccaaacatggagtagcctgggaggatagagaggggtgcagtgaggctaagccaggaatgggggagatatgggctaatggggccaatcaccatccccactctgcaaagcagaaaaagtaggtgagagaatatcaaaatgatggcccaagctgggatgggggagagtggaagcaggcatgaagtcccagcattttgcattcatacgcccatccacccacctgcatggtagttccgatggccgatggccttggggtctgtggcactgaaaggctgagggaagaagaaaagtaatcagaaaccatcctgatgcaccccatccaatctctaaggaatgtgtagaacacactggaatggattcccgccaccaccctggccttccatacctcagccatgttgctaatgacaattgccatgatgatgccgtagatggccacagcctcacagaagatgatgctggtagtggtagagattaggggtaaggagtggaaaggagaaagaaatgagaaagaaaccgtccttcctgcccagtaagtccccagcaatctttcccctataacatcccatcccacaaggtggcttgtcagaaacagtatgtcagatcaaacacacaggcagcgccaacacagctggttctgacaaaagtccaaggaccctgacacttacctgaccaggttcttggtcttgatcctgggggccttcactcctccaccaatgatggaggagccggtaatatagatgcccctggtggaaggataaaaaactgatgagcagagcccaagctgtcactgccctcagcatgcctaagaccccagtgacaccacctgccatgactcagcccctgcccccagtcccaccaccccaatactcaccaggctgccccaaccacagacagggagatagctaggccaatgcccaggttggaccacatgaagggcgaagtctccgtcaggaacctgttgtggaagcagagaagaaagcagttcagctctagcagggaagcggagcacaaaatcttaacccctcaaacccccttcaaccccaccaccagttctacaggcaacaactgaccgcgtatttcccaaaggtccatgtcccaggcaggcagtggtgtgggggagggactcagaccagagaaaagaagagaggctgcagggaagaagcttcaaggggaatcctccccctgccctcccttaccatgccacatcaaagcggaagcccaaatcaaaaatggtgtagcagactcctgcagcagtgagggagaaaaagggggttacgggctgctcggtagagagaagttcttcaacctaaagtagctgccgagctgaagggccacctccctgaaggggcgtcctcaggctgcccccaggtgacagtacagctgtgtagacagattcctctgcttaggcctccattttctgccattccctcgctaaaaccacctcccagaccaagcacctgcgcaggcagggtcgccacccgcaagcccgaatccgaggcgggaccgagggagcaagcgctccagccagatcccgccggcccagtccgttccgctgtttacccaacaagctgtgggtgggggagggcaaagcgactgggaaaagaggaaccggagcagccggcttgtgaccgagcgggccggtcaggagcaagaaaggggggacagcagtgagacgtgggagcgaggggagacagcgatagtggcaggacgggggagtgctgccctcgcggcccctacccgcccgcacccctcctcaagcagctggaaatccgggtctcctttgtcggagtcagaggccctcgcaggcgcaagtccccagagcctcgggtgcagagcgcgcggggggccagtattccccgcaggccacttccccgccgagttccgacccggccagctcggccgcgatgctgctcccgcccgccaggacccggcctcacccacggccagcgcgcaggcccagaaggccacgaagaccccggagtagagcagtgctagccccgtcatggcggcgacggcggcgggggtcggaacggcggggccggagctacaaacgcgtcccagcgtccaccgtccgtcccgcagtctgtccgcccgccccgcagcgtcacctaactcgcccacgtgat

SEQ ID NO: 10174 - DNA, 5311 bp, Homo sapiens
caggatgaagggctgggggactgcccagtgttacttgtcaggctgtgctgcccagccctgtttatctgtgtaattatttttgtaaacattgtattctctgtggtcgccacctcctcgcccccagcctcgggttcagtctgtcttccaggcctgcttgcacctcactgggctgctccggggtctctgcccctcattccaggcctggctgtcaggcccagccagcaggggcccgtgacccagcagcctgcccaaagcatttgtttctgggggatggggtgggggctgctccacaggaggtttgagcccagcaccctggggaaggggaccctgcacgacacccccttgccctccctccatgaggctaaaggcccagtcttcccaaatgtgctgccctcgttcatgtgccaaatggccccagcccacatgcccctcccctctctggagtgggagccccttctgaagtgtctgaatccctgaagtgttcatttgtccgtcctctgtgcagtgacagccccggccaagccacctctaatcctctgtagcaataacggtgcgccgcccatccctgcccattgtgcaccactaggattttaaagtccatagattttaatgaaatttctattcctgtctctgagcggctgctgtgctttgtctgggtcccccaggggacaagagtcaggctggaatgagacctctgtctgccaggcctttgtggaggcctgggaggagaaaggccaaaggctttgatgcttgggaccgatgcccggccactcagctccagacaccagggatctggcaagggggtggggcaagggccagacagaccaacagccttggggtcctggcgagagctcgccaagaccagatctgaagctggctgggccaaagcagctgaggcggcagcggcagacaggtgcgctgtggcagaagccagagcctactcggtgaccagcccttcaggctggggcttggggtgctgcactggacatgggtgtggaagctggcccttccctggggctgcactgaagctgccgtccccagcggtgggtagccgactggcctcgaggtcgaaggtagggctccagaggaggtgcaggcaggcagcactggagaggtgcaaccccgcagaggggaagcgggggtctgaggccctgtgtggaggaccccaagggccgctgcctggacaagaaagagtaactgtgaggggtggtggtctgatccttcagtccaccctgccctgtgtctactgttgtggtttacctgtggttgggagagacacaagaaggccccacagatgcctgcagctcctgctccatggccttcttctgttcctttagctctgaaggagagattgggctgagacagtgcccagctcttctagggtgtgtacaagtgtggggtgggagcaggaggctgggtgttctgggccctgctccgtgtcctcacctgccagggtgggctccagggctgcctcagaggggtggcaaggcctcaaatactcctcttccaggcagcgctgcagggagagctgcgtcagtgcccagactcaaggcaggggtggggcaaggcaggatacagaggccaagatccccagggcaggcccgtgcagccccttcagcccatccaccgtgagggcagccacgttccccagggaataccagccttgcggaagagctgagtttggcaagatagtggtggggcctgtacccagacttaggtaaaggaaggaggcaaaagacctaaaacggttggccctggccttaagggctcaactagaatcctgggcctccaggattttgcaggtgcacacaagcatgcacccctgagaaatggatgcaggactcacatagcctgtacatgcacctatgtatgcacacaggtacatgggtctcacccaggtgagagtctacgctcagcagtgaggctcgggggagggcccagggctgcggctcacctgcaggatgaggatctccctctccaaggtgtgacactcctcctccagaaggcccctgggacatgagggagcagcagccagaacccgagacacaggaccagggctcagctgagtccaccacatggccccaacctccagcctcagcaggagccccacccaacctgtccttcctcagcccacactgccctctgctgcttgggggctgacccagcatagacgtctggcccctgtgaggctctttctgggcaggaagtatcttcccctcgcctgcctcaccctggcaggcatccttctctctcccacacttctgcactgtgattcttcttgcctccatcttcccccacatcacagcccttccgctgcttaaaatcctctgacacaggctacccctgtgtcaaggtatttatttttgaaacagggtcggccaggcgaggtggctcatgcctgtaatcccagcactttgggaggctgagatgggcggatcatgagatcaagagatcgagaccatcctggctaacacagtgaaaccccgcctctactaaaaatacaaaaaaattagctgggcatggtggtgggcatctgtagtcccagctactcgggaggcttaggcaggagaatggtgtgaacccgggaggtggagcttgcagtgagccaagatcacgccactgcactccagcctgggcgccagaacaagactccatctcaaaaaaaaaaaaaaaagaaagaaagaaagaaagaaacagggtcttgctctgccacccatcatgactcactgtagccttaccttccagggctcaatcaatcccttctcacctcagcctcccaagtaactggtacaggcgtgcaccaccacgcccagctaatttttgtatttgttttggtagagatggggttttcccatgttggccaagctggtttcgaattcctgggcccaaatgaccctcttgcctcggcctcccaaattgctgggattataggcatgcaccatcatgctcggccgtggcatctgtacttggctgcttcctgaaagcaacctcactagctctatagcagccagctctttccacctctcagccttacgcacatgggcctccccgccaagtatactacccacctcctgtctcacaatcccagcacctcaagatccatccttgtctccacccctgcctatacacatgcaggtgcccctgggcctcacctcaggtgtctggccacctggtcaatgttggacacgttcagttggtccttgatgatgctgagatctctgtgaccgctgctggcaatgaagtcactatcactctccgcatgttgctcaccccaggccttcaggacccaaatatcacttctaggcaactgtttcttttctcacaaaggcaatataatatagtgcaaagagtaagagtttgggagcctaggtttgcaaatgagctctgccacccttcattgtgtgtgacttcaggcaaatcacttatcgcttctgagctttagtttcttttccttttttttttttttttttgagacaagattgtgctctgttgcccaggctggagtgcagtagcaccatcttggctcactgcagccttgacatcccgggctcaagtgctcttcccacatcagcctcctgagtagctgggactacaggtgcgtgccaccacgcctgttcaatttttttgcacagatggggtctcactatgttgcccaggcttcttttttttttttcttagagacagggtctttgtcacccaggttggagtgcacaggtgcaatcatagctcactgcagccccgaattcctgagctcaagcaattatcccacctcagcctcccaagtagctgggaatacaggcatgcgccacctcacctgactattttttttttcactttttgtaaagatggggtctccctgtattgcccaggctgatctcaaactcctggcctcaagccatcctcccgcctcagcctcccaaagtgctgggattacaggcatgagccactatgcccggcctttaatttcctcttgtgcaaaatggagattttgcccacctcctcaggctgtgtgaggattagaataagaagttgctgccatccacttatgaatattttatctcattcagtcccagctgtaaataccatttgtgaccatcctcttcagctctccctgcctccctagcccagccctcactcctgttctctaggccagaggaacaaccgcctgctggacatggcttcctttcttccctcttcctacaaagctcttctctttcatctccctgaaaactgctcctcatactacaacacgcagatcaaaccactttctccaggaagctttgcctgtccccaggctaggcaggtgtttcctctgggtttcagtagccctcatgggctgataatctctatcacaagtggcggtggaagtgcccagcccgtgactggaatctcctgcatggagccaggtgcaacccaccagtgggctagggccctctgccaagcagggacagatccctctctcctaccatcaccttacctgggcccaccacctctcatctggaatatctcctgttctggcaaatcacacctgggctcctccaaggcaaagtgcaggaccctggggctatactggacccaagcttgggcctggtccctgcagaaggtgcacaggaaggaagctgagaggctcctttctggaaaccacagaaaaggcaaccctggctccttgttaggggcagcgctagcccacctggtatctagggaaagggcccaggcctgaggctcccacctgccctcacagatggctttgtggcggagaccctggagcaactgccggagctcctggcgcaagaggtcctttaggagaggcggtggtgccagaagagaagaggggtcagagatggggcgggagctgggggcttgagaggatcgagcctcttggagcagtgcccgtaacatcgccacctgcaaggagagctgggataccttgcgactggggaggggagtgtccggaatggtgggggctgggggagtgagggagagggcggagtcaaaggggagaccaggataggatctcgggagttacccggcagggccagggacccgcaggaggtgggaaatcacccgagtcgtggggcaggccaggggcgtggcccaccttccctctccccacctccgcccgcagctccaggctcaggtccaccgccgcctcccccagaatcctcttcacttcgcgtcgctcccggagcggaacgtgctcctccaccagctcccacagcgagggggagtgccggagcatgacccaccgacgccgccgtccccggctcggacctacgggccgcaggtcagagtgcgggaggtaccgcgggcc

SEQ ID NO: 10175 - DNA, 38 bp, Homo sapiens
aaaaaaaaaaaaaaaaaaaaaaaaaaaaaaaaaagtgc

SEQ ID NO: 10176 - DNA, 38 bp, Homo sapiens
aaaaaaaaaaaaaaaaaaaaaaaaaaaaggaaagaaaa

SEQ ID NO: 10177 - DNA, 47 bp, Homo sapiens
ctgcctaaaaaaaaaaaaaaaaaaaaaaaaaaaaaaaaaaaatctgt

SEQ ID NO: 10178 - DNA, 1430 bp, Homo sapiens
atcaaatcttccattggctggtggcatgcacttaggtgggaaagaaggtggacggagataaacaaccacttctcaagagaacagccatgcagaacggaatcacaccaggctcttggactatgttgtgttttttgtttgtttgtttgtttgtttttgtttttttttttttgagacggagtcttgctctgtcgcccaggctggagtgcagtggtgcgatctcagctcactgcaagctccgcctcccgggttcacgccattctcctgcctcagcctcccgagcagctgggacttataggtgcccaccacctttttttttttttttttttttttgtatttttagtagagacatgatttcaccgtgttagccaggatggtctcaatctcctgaccttgtgatccgccctcctcggcctcccaaagtgctgggattacaggcttgagccaccgtgcccggccgactgtttttaacgttcatgggacctgtagtgatatgccccccaacctttattattattattattattattatatttttttattattatttttttagacagaatctcactctgtcatgcaggctggagtgcagtggcacgatttcagctcactgtaacctccacctcctggttcaagtgattctcctgcctcagcctcccagatagctgggactacaggcacacaccaccatgcccagctaatctttatatttttagtagagatgttgaccaggctggtcttgaactcctgacttcaggtgatccgcccacctcagcctcccaaagtactgggattacaggtgtgagccaccatgcccagctagatatgccctgtttctggtattagtaatttgtgtcttctcttttattagcttggctagaggcttactgatcttctcagaaataactcttggtttcattgattttctctatttatttcctgttttcaatttcattgatttctgctccaatttttatttctcttcttctgcttactttggatttaattattttctaattttcttatgtggaagcttagaatactgattttagatctttctactttcttcatgtatgcacagtcaatcctataaatttaagcaccttaaaaatttaccaatttttggccgggcgcagtggctcacgcctataatcccagcactttgggaggccaacgccgggggatcacctgaggtcaggagttcgagaccagcctggccaacacggtgaaaccccgtctctactaaaaatacaaaaattagccaggcgtggtggcaggcgcctgtaatcccaactacttgggagactgagtcaggagaatcgcttgaacccgggaggcggaggttgcagtgagccaagatcacgccatcacgctccagcctggggacaacagcaagactttgtctaaaaaaaaaaaaaaaaaaaaaaaaaaaa

SEQ ID NO: 10179 - DNA, 32174 bp, Homo sapiens; identical to SEQ ID NO: 6480
  SITE (29356): n equals a,t,g, or c
  SITE (29357): n equals a,t,g, or c
  SITE (29358): n equals a,t,g, or c
  SITE (29359): n equals a,t,g, or c
  SITE (29360): n equals a,t,g, or c
  SITE (29361): n equals a,t,g, or c
  SITE (29362): n equals a,t,g, or c
  SITE (29363): n equals a,t,g, or c
  SITE (29364): n equals a,t,g, or c
  SITE (29365): n equals a,t,g, or c
  SITE (29366): n equals a,t,g, or c
  SITE (29367): n equals a,t,g, or c
  SITE (29368): n equals a,t,g, or c
  SITE (29369): n equals a,t,g, or c
  SITE (29370): n equals a,t,g, or c
  SITE (29371): n equals a,t,g, or c
  SITE (29372): n equals a,t,g, or c
  SITE (29373): n equals a,t,g, or c
  SITE (29374): n equals a,t,g, or c
  SITE (29375): n equals a,t,g, or c
  SITE (29376): n equals a,t,g, or c
  SITE (29377): n equals a,t,g, or c
  SITE (29378): n equals a,t,g, or c
  SITE (29379): n equals a,t,g, or c
  SITE (29380): n equals a,t,g, or c
  SITE (29381): n equals a,t,g, or c
  SITE (29382): n equals a,t,g, or c
  SITE (29383): n equals a,t,g, or c
  SITE (29384): n equals a,t,g, or c
  SITE (29385): n equals a,t,g, or c
  SITE (29386): n equals a,t,g, or c
  SITE (29387): n equals a,t,g, or c
  SITE (29388): n equals a,t,g, or c
  SITE (29389): n equals a,t,g, or c
  SITE (29390): n equals a,t,g, or c
  SITE (29391): n equals a,t,g, or c
  SITE (29392): n equals a,t,g, or c
  SITE (29393): n equals a,t,g, or c
  SITE (29394): n equals a,t,g, or c
  SITE (29395): n equals a,t,g, or c
  SITE (29396): n equals a,t,g, or c
  SITE (29397): n equals a,t,g, or c
  SITE (29398): n equals a,t,g, or c
  SITE (29399): n equals a,t,g, or c
  SITE (29400): n equals a,t,g, or c
  SITE (29401): n equals a,t,g, or c
  SITE (29402): n equals a,t,g, or c
  SITE (29403): n equals a,t,g, or c
  SITE (29404): n equals a,t,g, or c
  SITE (29405): n equals a,t,g, or c
  SITE (29406): n equals a,t,g, or c
  SITE (29407): n equals a,t,g, or c
  SITE (29408): n equals a,t,g, or c
  SITE (29409): n equals a,t,g, or c
  SITE (29410): n equals a,t,g, or c
  SITE (29411): n equals a,t,g, or c
  SITE (29412): n equals a,t,g, or c
  SITE (29413): n equals a,t,g, or c
  SITE (29414): n equals a,t,g, or c
  SITE (29415): n equals a,t,g, or c
  SITE (29416): n equals a,t,g, or c
  SITE (29417): n equals a,t,g, or c
  SITE (29418): n equals a,t,g, or c
  SITE (29419): n equals a,t,g, or c
  SITE (29420): n equals a,t,g, or c
  SITE (29421): n equals a,t,g, or c
  SITE (29422): n equals a,t,g, or c
  SITE (29423): n equals a,t,g, or c
  SITE (29424): n equals a,t,g, or c
  SITE (29425): n equals a,t,g, or c
  SITE (29426): n equals a,t,g, or c
  SITE (29427): n equals a,t,g, or c
  SITE (29428): n equals a,t,g, or c
  SITE (29429): n equals a,t,g, or c
  SITE (29430): n equals a,t,g, or c
  SITE (29431): n equals a,t,g, or c
  SITE (29432): n equals a,t,g, or c
  SITE (29433): n equals a,t,g, or c
  SITE (29434): n equals a,t,g, or c
  SITE (29435): n equals a,t,g, or c
  SITE (29436): n equals a,t,g, or c
  SITE (29437): n equals a,t,g, or c
  SITE (29438): n equals a,t,g, or c
  SITE (29439): n equals a,t,g, or c
  SITE (29440): n equals a,t,g, or c
  SITE (29441): n equals a,t,g, or c
  SITE (29442): n equals a,t,g, or c
  SITE (29443): n equals a,t,g, or c
  SITE (29444): n equals a,t,g, or c
  SITE (29445): n equals a,t,g, or c
  SITE (29446): n equals a,t,g, or c
  SITE (29447): n equals a,t,g, or c
  SITE (29448): n equals a,t,g, or c
  SITE (29449): n equals a,t,g, or c
  SITE (29450): n equals a,t,g, or c
  SITE (29451): n equals a,t,g, or c
  SITE (29452): n equals a,t,g, or c
  SITE (29453): n equals a,t,g, or c
  SITE (29454): n equals a,t,g, or c
  SITE (29455): n equals a,t,g, or c
  SITE (29456): n equals a,t,g, or c
  SITE (29457): n equals a,t,g, or c
  SITE (29458): n equals a,t,g, or c
  SITE (29459): n equals a,t,g, or c
  SITE (29460): n equals a,t,g, or c
  SITE (29461): n equals a,t,g, or c
  SITE (29462): n equals a,t,g, or c
  SITE (29463): n equals a,t,g, or c
  SITE (29464): n equals a,t,g, or c
  SITE (29465): n equals a,t,g, or c
  SITE (29466): n equals a,t,g, or c
  SITE (29467): n equals a,t,g, or c
  SITE (29468): n equals a,t,g, or c
  SITE (29469): n equals a,t,g, or c
  SITE (29470): n equals a,t,g, or c
  SITE (29471): n equals a,t,g, or c
  SITE (29472): n equals a,t,g, or c
  SITE (29473): n equals a,t,g, or c
  SITE (29474): n equals a,t,g, or c
  SITE (29475): n equals a,t,g, or c
  SITE (29476): n equals a,t,g, or c
  SITE (29477): n equals a,t,g, or c
  SITE (29478): n equals a,t,g, or c
  SITE (29479): n equals a,t,g, or c
  SITE (29480): n equals a,t,g, or c
  SITE (29481): n equals a,t,g, or c
  SITE (29482): n equals a,t,g, or c
  SITE (29483): n equals a,t,g, or c
  SITE (29484): n equals a,t,g, or c
  SITE (29485): n equals a,t,g, or c
  SITE (29486): n equals a,t,g, or c
  SITE (29487): n equals a,t,g, or c
  SITE (29488): n equals a,t,g, or c
  SITE (29489): n equals a,t,g, or c
  SITE (29490): n equals a,t,g, or c
  SITE (29491): n equals a,t,g, or c
  SITE (29492): n equals a,t,g, or c
  SITE (29493): n equals a,t,g, or c
  SITE (29494): n equals a,t,g, or c
  SITE (29495): n equals a,t,g, or c
  SITE (29496): n equals a,t,g, or c
  SITE (29497): n equals a,t,g, or c
  SITE (29498): n equals a,t,g, or c
  SITE (29499): n equals a,t,g, or c
  SITE (29500): n equals a,t,g, or c
  SITE (29501): n equals a,t,g, or c
  SITE (29502): n equals a,t,g, or c
  SITE (29503): n equals a,t,g, or c
  SITE (29504): n equals a,t,g, or c
  SITE (29505): n equals a,t,g, or c
  SITE (29506): n equals a,t,g, or c
  SITE (29507): n equals a,t,g, or c
  SITE (29508): n equals a,t,g, or c
  SITE (29509): n equals a,t,g, or c
  SITE (29510): n equals a,t,g, or c
  SITE (29511): n equals a,t,g, or c
  SITE (29512): n equals a,t,g, or c
  SITE (29513): n equals a,t,g, or c
  SITE (29514): n equals a,t,g, or c
  SITE (29515): n equals a,t,g, or c
  SITE (29516): n equals a,t,g, or c
  SITE (29517): n equals a,t,g, or c
  SITE (29518): n equals a,t,g, or c
  SITE (29519): n equals a,t,g, or c
  SITE (29520): n equals a,t,g, or c
  SITE (29521): n equals a,t,g, or c
  SITE (29522): n equals a,t,g, or c
  SITE (29523): n equals a,t,g, or c
  SITE (29524): n equals a,t,g, or c
  SITE (29525): n equals a,t,g, or c
  SITE (29526): n equals a,t,g, or c
  SITE (29527): n equals a,t,g, or c
  SITE (29528): n equals a,t,g, or c
  SITE (29529): n equals a,t,g, or c
  SITE (29530): n equals a,t,g, or c
  SITE (29531): n equals a,t,g, or c
  SITE (29532): n equals a,t,g, or c
  SITE (29533): n equals a,t,g, or c
  SITE (29534): n equals a,t,g, or c
  SITE (29535): n equals a,t,g, or c
  SITE (29536): n equals a,t,g, or c
  SITE (29537): n equals a,t,g, or c
  SITE (29538): n equals a,t,g, or c
  SITE (29539): n equals a,t,g, or c
  SITE (29540): n equals a,t,g, or c
  SITE (29541): n equals a,t,g, or c
  SITE (29542): n equals a,t,g, or c
  SITE (29543): n equals a,t,g, or c
  SITE (29544): n equals a,t,g, or c
  SITE (29545): n equals a,t,g, or c
  SITE (29546): n equals a,t,g, or c
  SITE (29547): n equals a,t,g, or c
  SITE (29548): n equals a,t,g, or c
  SITE (29549): n equals a,t,g, or c
  SITE (29550): n equals a,t,g, or c
  SITE (29551): n equals a,t,g, or c
  SITE (29552): n equals a,t,g, or c
  SITE (29553): n equals a,t,g, or c
  SITE (29554): n equals a,t,g, or c
  SITE (29555): n equals a,t,g, or c
  SITE (29556): n equals a,t,g, or c
  SITE (29557): n equals a,t,g, or c
  SITE (29558): n equals a,t,g, or c
  SITE (29559): n equals a,t,g, or c
  SITE (29560): n equals a,t,g, or c
  SITE (29561): n equals a,t,g, or c
  SITE (29562): n equals a,t,g, or c
  SITE (29563): n equals a,t,g, or c
  SITE (29564): n equals a,t,g, or c
  SITE (29565): n equals a,t,g, or c
  SITE (29566): n equals a,t,g, or c
  SITE (29567): n equals a,t,g, or c
  SITE (29568): n equals a,t,g, or c
  SITE (29569): n equals a,t,g, or c
  SITE (29570): n equals a,t,g, or c
  SITE (29571): n equals a,t,g, or c
  SITE (29572): n equals a,t,g, or c
  SITE (29573): n equals a,t,g, or c
  SITE (29574): n equals a,t,g, or c
  SITE (29575): n equals a,t,g, or c
  SITE (29576): n equals a,t,g, or c
  SITE (29577): n equals a,t,g, or c
  SITE (29578): n equals a,t,g, or c
  SITE (29579): n equals a,t,g, or c
  SITE (29580): n equals a,t,g, or c
  SITE (29581): n equals a,t,g, or c
  SITE (29582): n equals a,t,g, or c
  SITE (29583): n equals a,t,g, or c
  SITE (29584): n equals a,t,g, or c
  SITE (29585): n equals a,t,g, or c
  SITE (29586): n equals a,t,g, or c
  SITE (29587): n equals a,t,g, or c
  SITE (29588): n equals a,t,g, or c
  SITE (29589): n equals a,t,g, or c
  SITE (29590): n equals a,t,g, or c
  SITE (29591): n equals a,t,g, or c
  SITE (29592): n equals a,t,g, or c
  SITE (29593): n equals a,t,g, or c
  SITE (29594): n equals a,t,g, or c
  SITE (29595): n equals a,t,g, or c
  SITE (29596): n equals a,t,g, or c
  SITE (29597): n equals a,t,g, or c
  SITE (29598): n equals a,t,g, or c
  SITE (29599): n equals a,t,g, or c
  SITE (29600): n equals a,t,g, or c
  SITE (29601): n equals a,t,g, or c
  SITE (29602): n equals a,t,g, or c
  SITE (29603): n equals a,t,g, or c
  SITE (29604): n equals a,t,g, or c
  SITE (29605): n equals a,t,g, or c
  SITE (29606): n equals a,t,g, or c
  SITE (29607): n equals a,t,g, or c
  SITE (29608): n equals a,t,g, or c
  SITE (29609): n equals a,t,g, or c
  SITE (29610): n equals a,t,g, or c
  SITE (29611): n equals a,t,g, or c
  SITE (29612): n equals a,t,g, or c
  SITE (29613): n equals a,t,g, or c
  SITE (29614): n equals a,t,g, or c
  SITE (29615): n equals a,t,g, or c
  SITE (29616): n equals a,t,g, or c
  SITE (29617): n equals a,t,g, or c
  SITE (29618): n equals a,t,g, or c
  SITE (29619): n equals a,t,g, or c
  SITE (29620): n equals a,t,g, or c
  SITE (29621): n equals a,t,g, or c
  SITE (29622): n equals a,t,g, or c
  SITE (29623): n equals a,t,g, or c
  SITE (29624): n equals a,t,g, or c
  SITE (29625): n equals a,t,g, or c
  SITE (29626): n equals a,t,g, or c
  SITE (29627): n equals a,t,g, or c
  SITE (29628): n equals a,t,g, or c
  SITE (29629): n equals a,t,g, or c
  SITE (29630): n equals a,t,g, or c
  SITE (29631): n equals a,t,g, or c
  SITE (29632): n equals a,t,g, or c
  SITE (29633): n equals a,t,g, or c
  SITE (29634): n equals a,t,g, or c
  SITE (29635): n equals a,t,g, or c
  SITE (29636): n equals a,t,g, or c
  SITE (29637): n equals a,t,g, or c
  SITE (29638): n equals a,t,g, or c
  SITE (29639): n equals a,t,g, or c
  SITE (29640): n equals a,t,g, or c
  SITE (29641): n equals a,t,g, or c
  SITE (29642): n equals a,t,g, or c
  SITE (29643): n equals a,t,g, or c
  SITE (29644): n equals a,t,g, or c
  SITE (29645): n equals a,t,g, or c
  SITE (29646): n equals a,t,g, or c
  SITE (29647): n equals a,t,g, or c
  SITE (29648): n equals a,t,g, or c
  SITE (29649): n equals a,t,g, or c
  SITE (29650): n equals a,t,g, or c
  SITE (29651): n equals a,t,g, or c
  SITE (29652): n equals a,t,g, or c
  SITE (29653): n equals a,t,g, or c
  SITE (29654): n equals a,t,g, or c
  SITE (29655): n equals a,t,g, or c
  SITE (29656): n equals a,t,g, or c
  SITE (29657): n equals a,t,g, or c
  SITE (29658): n equals a,t,g, or c
  SITE (29659): n equals a,t,g, or c
  SITE (29660): n equals a,t,g, or c
  SITE (29661): n equals a,t,g, or c
  SITE (29662): n equals a,t,g, or c
  SITE (29663): n equals a,t,g, or c
  SITE (29664): n equals a,t,g, or c
  SITE (29665): n equals a,t,g, or c
  SITE (29666): n equals a,t,g, or c
  SITE (29667): n equals a,t,g, or c
  SITE (29668): n equals a,t,g, or c
  SITE (29669): n equals a,t,g, or c
  SITE (29670): n equals a,t,g, or c
  SITE (29671): n equals a,t,g, or c
  SITE (29672): n equals a,t,g, or c
  SITE (29673): n equals a,t,g, or c
  SITE (29674): n equals a,t,g, or c
  SITE (29675): n equals a,t,g, or c
  SITE (29676): n equals a,t,g, or c
  SITE (29677): n equals a,t,g, or c
  SITE (29678): n equals a,t,g, or c
  SITE (29679): n equals a,t,g, or c
  SITE (29680): n equals a,t,g, or c
  SITE (29681): n equals a,t,g, or c
  SITE (29682): n equals a,t,g, or c
  SITE (29683): n equals a,t,g, or c
  SITE (29684): n equals a,t,g, or c
  SITE (29685): n equals a,t,g, or c
  SITE (29686): n equals a,t,g, or c
  SITE (29687): n equals a,t,g, or c
  SITE (29688): n equals a,t,g, or c
  SITE (29689): n equals a,t,g, or c
  SITE (29690): n equals a,t,g, or c
  SITE (29691): n equals a,t,g, or c
  SITE (29692): n equals a,t,g, or c
  SITE (29693): n equals a,t,g, or c
  SITE (29694): n equals a,t,g, or c
  SITE (29695): n equals a,t,g, or c
  SITE (29696): n equals a,t,g, or c
  SITE (29697): n equals a,t,g, or c
  SITE (29698): n equals a,t,g, or c
  SITE (29699): n equals a,t,g, or c
  SITE (29700): n equals a,t,g, or c
  SITE (29701): n equals a,t,g, or c
  SITE (29702): n equals a,t,g, or c
  SITE (29703): n equals a,t,g, or c
  SITE (29704): n equals a,t,g, or c
  SITE (29705): n equals a,t,g, or c
  SITE (29706): n equals a,t,g, or c
  SITE (29707): n equals a,t,g, or c
  SITE (29708): n equals a,t,g, or c
  SITE (29709): n equals a,t,g, or c
  SITE (29710): n equals a,t,g, or c
  SITE (29711): n equals a,t,g, or c
  SITE (29712): n equals a,t,g, or c
  SITE (29713): n equals a,t,g, or c
  SITE (29714): n equals a,t,g, or c
  SITE (29715): n equals a,t,g, or c
  SITE (29716): n equals a,t,g, or c
  SITE (29717): n equals a,t,g, or c
  SITE (29718): n equals a,t,g, or c
  SITE (29719): n equals a,t,g, or c
  SITE (29720): n equals a,t,g, or c
  SITE (29721): n equals a,t,g, or c
  SITE (29722): n equals a,t,g, or c
  SITE (29723): n equals a,t,g, or c
  SITE (29724): n equals a,t,g, or c
  SITE (29725): n equals a,t,g, or c
  SITE (29726): n equals a,t,g, or c
  SITE (29727): n equals a,t,g, or c
  SITE (29728): n equals a,t,g, or c
  SITE (29729): n equals a,t,g, or c
  SITE (29730): n equals a,t,g, or c
  SITE (29731): n equals a,t,g, or c
  SITE (29732): n equals a,t,g, or c
  SITE (29733): n equals a,t,g, or c
  SITE (29734): n equals a,t,g, or c
  SITE (29735): n equals a,t,g, or c
  SITE (29736): n equals a,t,g, or c
  SITE (29737): n equals a,t,g, or c
  SITE (29738): n equals a,t,g, or c
  SITE (29739): n equals a,t,g, or c
  SITE (29740): n equals a,t,g, or c
  SITE (29741): n equals a,t,g, or c
  SITE (29742): n equals a,t,g, or c
  SITE (29743): n equals a,t,g, or c
  SITE (29744): n equals a,t,g, or c
  SITE (29745): n equals a,t,g, or c
  SITE (29746): n equals a,t,g, or c
  SITE (29747): n equals a,t,g, or c
  SITE (29748): n equals a,t,g, or c
  SITE (29749): n equals a,t,g, or c
  SITE (29750): n equals a,t,g, or c
  SITE (29751): n equals a,t,g, or c
  SITE (29752): n equals a,t,g, or c
  SITE (29753): n equals a,t,g, or c
  SITE (29754): n equals a,t,g, or c
  SITE (29755): n equals a,t,g, or c
  SITE (29756): n equals a,t,g, or c
  SITE (29757): n equals a,t,g, or c
  SITE (29758): n equals a,t,g, or c
  SITE (29759): n equals a,t,g, or c
  SITE (29760): n equals a,t,g, or c
  SITE (29761): n equals a,t,g, or c
  SITE (29762): n equals a,t,g, or c
  SITE (29763): n equals a,t,g, or c
  SITE (29764): n equals a,t,g, or c
  SITE (29765): n equals a,t,g, or c
  SITE (29766): n equals a,t,g, or c
  SITE (29767): n equals a,t,g, or c
  SITE (29768): n equals a,t,g, or c
  SITE (29769): n equals a,t,g, or c
  SITE (29770): n equals a,t,g, or c
  SITE (29771): n equals a,t,g, or c
  SITE (29772): n equals a,t,g, or c
  SITE (29773): n equals a,t,g, or c
  SITE (29774): n equals a,t,g, or c
  SITE (29775): n equals a,t,g, or c
  SITE (29776): n equals a,t,g, or c
  SITE (29777): n equals a,t,g, or c
  SITE (29778): n equals a,t,g, or c
  SITE (29779): n equals a,t,g, or c
  SITE (29780): n equals a,t,g, or c
  SITE (29781): n equals a,t,g, or c
  SITE (29782): n equals a,t,g, or c
  SITE (29783): n equals a,t,g, or c
  SITE (29784): n equals a,t,g, or c
  SITE (29785): n equals a,t,g, or c
  SITE (29786): n equals a,t,g, or c
  SITE (29787): n equals a,t,g, or c
  SITE (29788): n equals a,t,g, or c
  SITE (29789): n equals a,t,g, or c
  SITE (29790): n equals a,t,g, or c
  SITE (29791): n equals a,t,g, or c
  SITE (29792): n equals a,t,g, or c
  SITE (29793): n equals a,t,g, or c
  SITE (29794): n equals a,t,g, or c
  SITE (29795): n equals a,t,g, or c
  SITE (29796): n equals a,t,g, or c
  SITE (29797): n equals a,t,g, or c
  SITE (29798): n equals a,t,g, or c
  SITE (29799): n equals a,t,g, or c
  SITE (29800): n equals a,t,g, or c
  SITE (29801): n equals a,t,g, or c
  SITE (29802): n equals a,t,g, or c
  SITE (29803): n equals a,t,g, or c
  SITE (29804): n equals a,t,g, or c
  SITE (29805): n equals a,t,g, or c
  SITE (29806): n equals a,t,g, or c
  SITE (29807): n equals a,t,g, or c
  SITE (29808): n equals a,t,g, or c
  SITE (29809): n equals a,t,g, or c
  SITE (29810): n equals a,t,g, or c
  SITE (29811): n equals a,t,g, or c
  SITE (29812): n equals a,t,g, or c
  SITE (29813): n equals a,t,g, or c
  SITE (29814): n equals a,t,g, or c
  SITE (29815): n equals a,t,g, or c
  SITE (29816): n equals a,t,g, or c
  SITE (29817): n equals a,t,g, or c
  SITE (29818): n equals a,t,g, or c
  SITE (29819): n equals a,t,g, or c
  SITE (29820): n equals a,t,g, or c
  SITE (29821): n equals a,t,g, or c
  SITE (29822): n equals a,t,g, or c
  SITE (29823): n equals a,t,g, or c
  SITE (29824): n equals a,t,g, or c
  SITE (29825): n equals a,t,g, or c
  SITE (29826): n equals a,t,g, or c
  SITE (29827): n equals a,t,g, or c
  SITE (29828): n equals a,t,g, or c
  SITE (29829): n equals a,t,g, or c
  SITE (29830): n equals a,t,g, or c
  SITE (29831): n equals a,t,g, or c
  SITE (29832): n equals a,t,g, or c
  SITE (29833): n equals a,t,g, or c
  SITE (29834): n equals a,t,g, or c
  SITE (29835): n equals a,t,g, or c
  SITE (29836): n equals a,t,g, or c
  SITE (29837): n equals a,t,g, or c
  SITE (29838): n equals a,t,g, or c
  SITE (29839): n equals a,t,g, or c
  SITE (29840): n equals a,t,g, or c
  SITE (29841): n equals a,t,g, or c
  SITE (29842): n equals a,t,g, or c
  SITE (29843): n equals a,t,g, or c
  SITE (29844): n equals a,t,g, or c
  SITE (29845): n equals a,t,g, or c
  SITE (29846): n equals a,t,g, or c
  SITE (29847): n equals a,t,g, or c
  SITE (29848): n equals a,t,g, or c
  SITE (29849): n equals a,t,g, or c
  SITE (29850): n equals a,t,g, or c
  SITE (29851): n equals a,t,g, or c
  SITE (29852): n equals a,t,g, or c
  SITE (29853): n equals a,t,g, or c
  SITE (29854): n equals a,t,g, or c
  SITE (29855): n equals a,t,g, or c
  SITE (29856): n equals a,t,g, or c
  SITE (29857): n equals a,t,g, or c
  SITE (29858): n equals a,t,g, or c
  SITE (29859): n equals a,t,g, or c
  SITE (29860): n equals a,t,g, or c
  SITE (29861): n equals a,t,g, or c
  SITE (29862): n equals a,t,g, or c
  SITE (29863): n equals a,t,g, or c
  SITE (29864): n equals a,t,g, or c
  SITE (29865): n equals a,t,g, or c
  SITE (29866): n equals a,t,g, or c
  SITE (29867): n equals a,t,g, or c
  SITE (29868): n equals a,t,g, or c
  SITE (29869): n equals a,t,g, or c
  SITE (29870): n equals a,t,g, or c
  SITE (29871): n equals a,t,g, or c
  SITE (29872): n equals a,t,g, or c
  SITE (29873): n equals a,t,g, or c
  SITE (29874): n equals a,t,g, or c
  SITE (29875): n equals a,t,g, or c
  SITE (29876): n equals a,t,g, or c
  SITE (29877): n equals a,t,g, or c
  SITE (29878): n equals a,t,g, or c
  SITE (29879): n equals a,t,g, or c
  SITE (29880): n equals a,t,g, or c
  SITE (29881): n equals a,t,g, or c
  SITE (29882): n equals a,t,g, or c
  SITE (29883): n equals a,t,g, or c
  SITE (29884): n equals a,t,g, or c
  SITE (29885): n equals a,t,g, or c
  SITE (29886): n equals a,t,g, or c
  SITE (29887): n equals a,t,g, or c
  SITE (29888): n equals a,t,g, or c
  SITE (29889): n equals a,t,g, or c
  SITE (29890): n equals a,t,g, or c
  SITE (29891): n equals a,t,g, or c
  SITE (29892): n equals a,t,g, or c
  SITE (29893): n equals a,t,g, or c
  SITE (29894): n equals a,t,g, or c
  SITE (29895): n equals a,t,g, or c
  SITE (29896): n equals a,t,g, or c
  SITE (29897): n equals a,t,g, or c
  SITE (29898): n equals a,t,g, or c
  SITE (29899): n equals a,t,g, or c
  SITE (29900): n equals a,t,g, or c
  SITE (29901): n equals a,t,g, or c
  SITE (29902): n equals a,t,g, or c
  SITE (29903): n equals a,t,g, or c
  SITE (29904): n equals a,t,g, or c
  SITE (29905): n equals a,t,g, or c
  SITE (29906): n equals a,t,g, or c
  SITE (29907): n equals a,t,g, or c
  SITE (29908): n equals a,t,g, or c
  SITE (29909): n equals a,t,g, or c
  SITE (29910): n equals a,t,g, or c
  SITE (29911): n equals a,t,g, or c
  SITE (29912): n equals a,t,g, or c
  SITE (29913): n equals a,t,g, or c
  SITE (29914): n equals a,t,g, or c
  SITE (29915): n equals a,t,g, or c
  SITE (29916): n equals a,t,g, or c
  SITE (29917): n equals a,t,g, or c
  SITE (29918): n equals a,t,g, or c
  SITE (29919): n equals a,t,g, or c
  SITE (29920): n equals a,t,g, or c
  SITE (29921): n equals a,t,g, or c
  SITE (29922): n equals a,t,g, or c
  SITE (29923): n equals a,t,g, or c
  SITE (29924): n equals a,t,g, or c
  SITE (29925): n equals a,t,g, or c
  SITE (29926): n equals a,t,g, or c
  SITE (29927): n equals a,t,g, or c
  SITE (29928): n equals a,t,g, or c
  SITE (29929): n equals a,t,g, or c
  SITE (29930): n equals a,t,g, or c
  SITE (29931): n equals a,t,g, or c
  SITE (29932): n equals a,t,g, or c
  SITE (29933): n equals a,t,g, or c
  SITE (29934): n equals a,t,g, or c
  SITE (29935): n equals a,t,g, or c
  SITE (29936): n equals a,t,g, or c
  SITE (29937): n equals a,t,g, or c
  SITE (29938): n equals a,t,g, or c
  SITE (29939): n equals a,t,g, or c
  SITE (29940): n equals a,t,g, or c
  SITE (29941): n equals a,t,g, or c
  SITE (29942): n equals a,t,g, or c
  SITE (29943): n equals a,t,g, or c
  SITE (29944): n equals a,t,g, or c
  SITE (29945): n equals a,t,g, or c
  SITE (29946): n equals a,t,g, or c
  SITE (29947): n equals a,t,g, or c
  SITE (29948): n equals a,t,g, or c
  SITE (29949): n equals a,t,g, or c
  SITE (29950): n equals a,t,g, or c
  SITE (29951): n equals a,t,g, or c
  SITE (29952): n equals a,t,g, or c
  SITE (29953): n equals a,t,g, or c
  SITE (29954): n equals a,t,g, or c
  SITE (29955): n equals a,t,g, or c
  SITE (29956): n equals a,t,g, or c
  SITE (29957): n equals a,t,g, or c
  SITE (29958): n equals a,t,g, or c
  SITE (29959): n equals a,t,g, or c
  SITE (29960): n equals a,t,g, or c
  SITE (29961): n equals a,t,g, or c
  SITE (29962): n equals a,t,g, or c
  SITE (29963): n equals a,t,g, or c
  SITE (29964): n equals a,t,g, or c
  SITE (29965): n equals a,t,g, or c
  SITE (29966): n equals a,t,g, or c
  SITE (29967): n equals a,t,g, or c
  SITE (29968): n equals a,t,g, or c
  SITE (29969): n equals a,t,g, or c
  SITE (29970): n equals a,t,g, or c
  SITE (29971): n equals a,t,g, or c
  SITE (29972): n equals a,t,g, or c
  SITE (29973): n equals a,t,g, or c
  SITE (29974): n equals a,t,g, or c
  SITE (29975): n equals a,t,g, or c
  SITE (29976): n equals a,t,g, or c
  SITE (29977): n equals a,t,g, or c
  SITE (29978): n equals a,t,g, or c
  SITE (29979): n equals a,t,g, or c
  SITE (29980): n equals a,t,g, or c
  SITE (29981): n equals a,t,g, or c
  SITE (29982): n equals a,t,g, or c
  SITE (29983): n equals a,t,g, or c
  SITE (29984): n equals a,t,g, or c
  SITE (29985): n equals a,t,g, or c
  SITE (29986): n equals a,t,g, or c
  SITE (29987): n equals a,t,g, or c
  SITE (29988): n equals a,t,g, or c
  SITE (29989): n equals a,t,g, or c
  SITE (29990): n equals a,t,g, or c
  SITE (29991): n equals a,t,g, or c
  SITE (29992): n equals a,t,g, or c
  SITE (29993): n equals a,t,g, or c
  SITE (29994): n equals a,t,g, or c
  SITE (29995): n equals a,t,g, or c
  SITE (29996): n equals a,t,g, or c
  SITE (29997): n equals a,t,g, or c
  SITE (29998): n equals a,t,g, or c
  SITE (29999): n equals a,t,g, or c
  SITE (30000): n equals a,t,g, or c
  SITE (30001): n equals a,t,g, or c
  SITE (30002): n equals a,t,g, or c
  SITE (30003): n equals a,t,g, or c
  SITE (30004): n equals a,t,g, or c
  SITE (30005): n equals a,t,g, or c
  SITE (30006): n equals a,t,g, or c
  SITE (30007): n equals a,t,g, or c
  SITE (30008): n equals a,t,g, or c
  SITE (30009): n equals a,t,g, or c
  SITE (30010): n equals a,t,g, or c
  SITE (30011): n equals a,t,g, or c
  SITE (30012): n equals a,t,g, or c
  SITE (30013): n equals a,t,g, or c
  SITE (30014): n equals a,t,g, or c
  SITE (30015): n equals a,t,g, or c
  SITE (30016): n equals a,t,g, or c
  SITE (30017): n equals a,t,g, or c
  SITE (30018): n equals a,t,g, or c
  SITE (30019): n equals a,t,g, or c
  SITE (30020): n equals a,t,g, or c
  SITE (30021): n equals a,t,g, or c
  SITE (30022): n equals a,t,g, or c
  SITE (30023): n equals a,t,g, or c
  SITE (30024): n equals a,t,g, or c
  SITE (30025): n equals a,t,g, or c
  SITE (30026): n equals a,t,g, or c
  SITE (30027): n equals a,t,g, or c
  SITE (30028): n equals a,t,g, or c
  SITE (30029): n equals a,t,g, or c
  SITE (30030): n equals a,t,g, or c
  SITE (30031): n equals a,t,g, or c
  SITE (30032): n equals a,t,g, or c
  SITE (30033): n equals a,t,g, or c
  SITE (30034): n equals a,t,g, or c
  SITE (30035): n equals a,t,g, or c
  SITE (30036): n equals a,t,g, or c
  SITE (30037): n equals a,t,g, or c
  SITE (30038): n equals a,t,g, or c
  SITE (30039): n equals a,t,g, or c
  SITE (30040): n equals a,t,g, or c
  SITE (30041): n equals a,t,g, or c
  SITE (30042): n equals a,t,g, or c
  SITE (30043): n equals a,t,g, or c
  SITE (30044): n equals a,t,g, or c
  SITE (30045): n equals a,t,g, or c
  SITE (30046): n equals a,t,g, or c
  SITE (30047): n equals a,t,g, or c
  SITE (30048): n equals a,t,g, or c
  SITE (30049): n equals a,t,g, or c
  SITE (30050): n equals a,t,g, or c
  SITE (30051): n equals a,t,g, or c
  SITE (30052): n equals a,t,g, or c
  SITE (30053): n equals a,t,g, or c
  SITE (30054): n equals a,t,g, or c
  SITE (30055): n equals a,t,g, or c
  SITE (30056): n equals a,t,g, or c
  SITE (30057): n equals a,t,g, or c
  SITE (30058): n equals a,t,g, or c
  SITE (30059): n equals a,t,g, or c
  SITE (30060): n equals a,t,g, or c
  SITE (30061): n equals a,t,g, or c
  SITE (30062): n equals a,t,g, or c
  SITE (30063): n equals a,t,g, or c
  SITE (30064): n equals a,t,g, or c
  SITE (30065): n equals a,t,g, or c
  SITE (30066): n equals a,t,g, or c
  SITE (30067): n equals a,t,g, or c
  SITE (30068): n equals a,t,g, or c
  SITE (30069): n equals a,t,g, or c
  SITE (30070): n equals a,t,g, or c
  SITE (30071): n equals a,t,g, or c
  SITE (30072): n equals a,t,g, or c
  SITE (30073): n equals a,t,g, or c
  SITE (30074): n equals a,t,g, or c
  SITE (30075): n equals a,t,g, or c
  SITE (30076): n equals a,t,g, or c
  SITE (30077): n equals a,t,g, or c
  SITE (30078): n equals a,t,g, or c
  SITE (30079): n equals a,t,g, or c
  SITE (30080): n equals a,t,g, or c
  SITE (30081): n equals a,t,g, or c
  SITE (30082): n equals a,t,g, or c
  SITE (30083): n equals a,t,g, or c
  SITE (30084): n equals a,t,g, or c
  SITE (30085): n equals a,t,g, or c
  SITE (30086): n equals a,t,g, or c
  SITE (30087): n equals a,t,g, or c
  SITE (30088): n equals a,t,g, or c
  SITE (30089): n equals a,t,g, or c
  SITE (30090): n equals a,t,g, or c
  SITE (30091): n equals a,t,g, or c
  SITE (30092): n equals a,t,g, or c
  SITE (30093): n equals a,t,g, or c
  SITE (30094): n equals a,t,g, or c
  SITE (30095): n equals a,t,g, or c
  SITE (30096): n equals a,t,g, or c
  SITE (30097): n equals a,t,g, or c
  SITE (30098): n equals a,t,g, or c
  SITE (30099): n equals a,t,g, or c
  SITE (30100): n equals a,t,g, or c
  SITE (30101): n equals a,t,g, or c
  SITE (30102): n equals a,t,g, or c
  SITE (30103): n equals a,t,g, or c
  SITE (30104): n equals a,t,g, or c
  SITE (30105): n equals a,t,g, or c
  SITE (30106): n equals a,t,g, or c
  SITE (30107): n equals a,t,g, or c
  SITE (30108): n equals a,t,g, or c
  SITE (30109): n equals a,t,g, or c
  SITE (30110): n equals a,t,g, or c
  SITE (30111): n equals a,t,g, or c
  SITE (30112): n equals a,t,g, or c
  SITE (30113): n equals a,t,g, or c
  SITE (30114): n equals a,t,g, or c
  SITE (30115): n equals a,t,g, or c
  SITE (30116): n equals a,t,g, or c
  SITE (30117): n equals a,t,g, or c
  SITE (30118): n equals a,t,g, or c
  SITE (30119): n equals a,t,g, or c
  SITE (30120): n equals a,t,g, or c
  SITE (30121): n equals a,t,g, or c
  SITE (30122): n equals a,t,g, or c
  SITE (30123): n equals a,t,g, or c
  SITE (30124): n equals a,t,g, or c
  SITE (30125): n equals a,t,g, or c
  SITE (30126): n equals a,t,g, or c
  SITE (30127): n equals a,t,g, or c
  SITE (30128): n equals a,t,g, or c
  SITE (30129): n equals a,t,g, or c
  SITE (30130): n equals a,t,g, or c
  SITE (30131): n equals a,t,g, or c
  SITE (30132): n equals a,t,g, or c
  SITE (30133): n equals a,t,g, or c
  SITE (30134): n equals a,t,g, or c
  SITE (30135): n equals a,t,g, or c
  SITE (30136): n equals a,t,g, or c
  SITE (30137): n equals a,t,g, or c
  SITE (30138): n equals a,t,g, or c
  SITE (30139): n equals a,t,g, or c
  SITE (30140): n equals a,t,g, or c
  SITE (30141): n equals a,t,g, or c
  SITE (30142): n equals a,t,g, or c
  SITE (30143): n equals a,t,g, or c
  SITE (30144): n equals a,t,g, or c
  SITE (30145): n equals a,t,g, or c
  SITE (30146): n equals a,t,g, or c
  SITE (30147): n equals a,t,g, or c
  SITE (30148): n equals a,t,g, or c
  SITE (30149): n equals a,t,g, or c
  SITE (30150): n equals a,t,g, or c
  SITE (30151): n equals a,t,g, or c
  SITE (30152): n equals a,t,g, or c
  SITE (30153): n equals a,t,g, or c
  SITE (30154): n equals a,t,g, or c
  SITE (30155): n equals a,t,g, or c
  SITE (30156): n equals a,t,g, or c
  SITE (30157): n equals a,t,g, or c
  SITE (30158): n equals a,t,g, or c
  SITE (30159): n equals a,t,g, or c
  SITE (30160): n equals a,t,g, or c
  SITE (30161): n equals a,t,g, or c
  SITE (30162): n equals a,t,g, or c
  SITE (30163): n equals a,t,g, or c
  SITE (30164): n equals a,t,g, or c
  SITE (30165): n equals a,t,g, or c
  SITE (30166): n equals a,t,g, or c
  SITE (30167): n equals a,t,g, or c
  SITE (30168): n equals a,t,g, or c
  SITE (30169): n equals a,t,g, or c
  SITE (30170): n equals a,t,g, or c
  SITE (30171): n equals a,t,g, or c
  SITE (30172): n equals a,t,g, or c
  SITE (30173): n equals a,t,g, or c
  SITE (30174): n equals a,t,g, or c
  SITE (30175): n equals a,t,g, or c
  SITE (30176): n equals a,t,g, or c
  SITE (30177): n equals a,t,g, or c
  SITE (30178): n equals a,t,g, or c
  SITE (30179): n equals a,t,g, or c
  SITE (30180): n equals a,t,g, or c
  SITE (30181): n equals a,t,g, or c
  SITE (30182): n equals a,t,g, or c
  SITE (30183): n equals a,t,g, or c
  SITE (30184): n equals a,t,g, or c
  SITE (30185): n equals a,t,g, or c
  SITE (30186): n equals a,t,g, or c
  SITE (30187): n equals a,t,g, or c
  SITE (30188): n equals a,t,g, or c
  SITE (30189): n equals a,t,g, or c
  SITE (30190): n equals a,t,g, or c
  SITE (30191): n equals a,t,g, or c
  SITE (30192): n equals a,t,g, or c
  SITE (30193): n equals a,t,g, or c
  SITE (30194): n equals a,t,g, or c
  SITE (30195): n equals a,t,g, or c
  SITE (30196): n equals a,t,g, or c
  SITE (30197): n equals a,t,g, or c
  SITE (30198): n equals a,t,g, or c
  SITE (30199): n equals a,t,g, or c
  SITE (30200): n equals a,t,g, or c
  SITE (30201): n equals a,t,g, or c
  SITE (30202): n equals a,t,g, or c
  SITE (30203): n equals a,t,g, or c
  SITE (30204): n equals a,t,g, or c
  SITE (30205): n equals a,t,g, or c
  SITE (30206): n equals a,t,g, or c
  SITE (30207): n equals a,t,g, or c
  SITE (30208): n equals a,t,g, or c
  SITE (30209): n equals a,t,g, or c
  SITE (30210): n equals a,t,g, or c
  SITE (30211): n equals a,t,g, or c
  SITE (30212): n equals a,t,g, or c
  SITE (30213): n equals a,t,g, or c
  SITE (30214): n equals a,t,g, or c
  SITE (30215): n equals a,t,g, or c
  SITE (30216): n equals a,t,g, or c
  SITE (30217): n equals a,t,g, or c
  SITE (30218): n equals a,t,g, or c
  SITE (30219): n equals a,t,g, or c
  SITE (30220): n equals a,t,g, or c
  SITE (30221): n equals a,t,g, or c
  SITE (30222): n equals a,t,g, or c
  SITE (30223): n equals a,t,g, or c
  SITE (30224): n equals a,t,g, or c
  SITE (30225): n equals a,t,g, or c
  SITE (30226): n equals a,t,g, or c
  SITE (30227): n equals a,t,g, or c
  SITE (30228): n equals a,t,g, or c
  SITE (30229): n equals a,t,g, or c
  SITE (30230): n equals a,t,g, or c
  SITE (30231): n equals a,t,g, or c
  SITE (30232): n equals a,t,g, or c
  SITE (30233): n equals a,t,g, or c
  SITE (30234): n equals a,t,g, or c
  SITE (30235): n equals a,t,g, or c
  SITE (30236): n equals a,t,g, or c
  SITE (30237): n equals a,t,g, or c
  SITE (30238): n equals a,t,g, or c
  SITE (30239): n equals a,t,g, or c
  SITE (30240): n equals a,t,g, or c
  SITE (30241): n equals a,t,g, or c
  SITE (30242): n equals a,t,g, or c
  SITE (30243): n equals a,t,g, or c
  SITE (30244): n equals a,t,g, or c
  SITE (30245): n equals a,t,g, or c
  SITE (30246): n equals a,t,g, or c
  SITE (30247): n equals a,t,g, or c
  SITE (30248): n equals a,t,g, or c
  SITE (30249): n equals a,t,g, or c
  SITE (30250): n equals a,t,g, or c
  SITE (30251): n equals a,t,g, or c
  SITE (30252): n equals a,t,g, or c
  SITE (30253): n equals a,t,g, or c
  SITE (30254): n equals a,t,g, or c
  SITE (30255): n equals a,t,g, or c
  SITE (30256): n equals a,t,g, or c
  SITE (30257): n equals a,t,g, or c
  SITE (30258): n equals a,t,g, or c
  SITE (30259): n equals a,t,g, or c
  SITE (30260): n equals a,t,g, or c
  SITE (30261): n equals a,t,g, or c
  SITE (30262): n equals a,t,g, or c
  SITE (30263): n equals a,t,g, or c
  SITE (30264): n equals a,t,g, or c
  SITE (30265): n equals a,t,g, or c
  SITE (30266): n equals a,t,g, or c
  SITE (30267): n equals a,t,g, or c
  SITE (30268): n equals a,t,g, or c
  SITE (30269): n equals a,t,g, or c
  SITE (30270): n equals a,t,g, or c
  SITE (30271): n equals a,t,g, or c
  SITE (30272): n equals a,t,g, or c
  SITE (30273): n equals a,t,g, or c
  SITE (30274): n equals a,t,g, or c
  SITE (30275): n equals a,t,g, or c
  SITE (30276): n equals a,t,g, or c
  SITE (30277): n equals a,t,g, or c
  SITE (30278): n equals a,t,g, or c
  SITE (30279): n equals a,t,g, or c
  SITE (30280): n equals a,t,g, or c
  SITE (30281): n equals a,t,g, or c
  SITE (30282): n equals a,t,g, or c
  SITE (30283): n equals a,t,g, or c
  SITE (30284): n equals a,t,g, or c
  SITE (30285): n equals a,t,g, or c
  SITE (30286): n equals a,t,g, or c
  SITE (30287): n equals a,t,g, or c
  SITE (30288): n equals a,t,g, or c
  SITE (30289): n equals a,t,g, or c
  SITE (30290): n equals a,t,g, or c
  SITE (30291): n equals a,t,g, or c
  SITE (30292): n equals a,t,g, or c
  SITE (30293): n equals a,t,g, or c
  SITE (30294): n equals a,t,g, or c
  SITE (30295): n equals a,t,g, or c
  SITE (30296): n equals a,t,g, or c
  SITE (30297): n equals a,t,g, or c
  SITE (30298): n equals a,t,g, or c
  SITE (30299): n equals a,t,g, or c
  SITE (30300): n equals a,t,g, or c
  SITE (30301): n equals a,t,g, or c
  SITE (30302): n equals a,t,g, or c
  SITE (30303): n equals a,t,g, or c
  SITE (30304): n equals a,t,g, or c
  SITE (30305): n equals a,t,g, or c
  SITE (30306): n equals a,t,g, or c
  SITE (30307): n equals a,t,g, or c
  SITE (30308): n equals a,t,g, or c
  SITE (30309): n equals a,t,g, or c
  SITE (30310): n equals a,t,g, or c
  SITE (30311): n equals a,t,g, or c
  SITE (30312): n equals a,t,g, or c
  SITE (30313): n equals a,t,g, or c
  SITE (30314): n equals a,t,g, or c
  SITE (30315): n equals a,t,g, or c
  SITE (30316): n equals a,t,g, or c
  SITE (30317): n equals a,t,g, or c
  SITE (30318): n equals a,t,g, or c
  SITE (30319): n equals a,t,g, or c
  SITE (30320): n equals a,t,g, or c
  SITE (30321): n equals a,t,g, or c
  SITE (30322): n equals a,t,g, or c
  SITE (30323): n equals a,t,g, or c
  SITE (30324): n equals a,t,g, or c
  SITE (30325): n equals a,t,g, or c
  SITE (30326): n equals a,t,g, or c
  SITE (30327): n equals a,t,g, or c
  SITE (30328): n equals a,t,g, or c
  SITE (30329): n equals a,t,g, or c
  SITE (30330): n equals a,t,g, or c
  SITE (30331): n equals a,t,g, or c
  SITE (30332): n equals a,t,g, or c
  SITE (30333): n equals a,t,g, or c
  SITE (30334): n equals a,t,g, or c
  SITE (30335): n equals a,t,g, or c
  SITE (30336): n equals a,t,g, or c
  SITE (30337): n equals a,t,g, or c
  SITE (30338): n equals a,t,g, or c
  SITE (30339): n equals a,t,g, or c
  SITE (30340): n equals a,t,g, or c
  SITE (30341): n equals a,t,g, or c
  SITE (30342): n equals a,t,g, or c
  SITE (30343): n equals a,t,g, or c
  SITE (30344): n equals a,t,g, or c
  SITE (30345): n equals a,t,g, or c
  SITE (30346): n equals a,t,g, or c
  SITE (30347): n equals a,t,g, or c
  SITE (30348): n equals a,t,g, or c
  SITE (30349): n equals a,t,g, or c
  SITE (30350): n equals a,t,g, or c
  SITE (30351): n equals a,t,g, or c
  SITE (30352): n equals a,t,g, or c
  SITE (30353): n equals a,t,g, or c
  SITE (30354): n equals a,t,g, or c
  SITE (30355): n equals a,t,g, or c
  SITE (30356): n equals a,t,g, or c
  SITE (30357): n equals a,t,g, or c
  SITE (30358): n equals a,t,g, or c
  SITE (30359): n equals a,t,g, or c
  SITE (30360): n equals a,t,g, or c
  SITE (30361): n equals a,t,g, or c
  SITE (30362): n equals a,t,g, or c
  SITE (30363): n equals a,t,g, or c
  SITE (30364): n equals a,t,g, or c
  SITE (30365): n equals a,t,g, or c
  SITE (30366): n equals a,t,g, or c
  SITE (30367): n equals a,t,g, or c
  SITE (30368): n equals a,t,g, or c
  SITE (30369): n equals a,t,g, or c
  SITE (30370): n equals a,t,g, or c
  SITE (30371): n equals a,t,g, or c
  SITE (30372): n equals a,t,g, or c
  SITE (30373): n equals a,t,g, or c
  SITE (30374): n equals a,t,g, or c
  SITE (30375): n equals a,t,g, or c
  SITE (30376): n equals a,t,g, or c
  SITE (30377): n equals a,t,g, or c
  SITE (30378): n equals a,t,g, or c
  SITE (30379): n equals a,t,g, or c
  SITE (30380): n equals a,t,g, or c
  SITE (30381): n equals a,t,g, or c
  SITE (30382): n equals a,t,g, or c
  SITE (30383): n equals a,t,g, or c
  SITE (30384): n equals a,t,g, or c
  SITE (30385): n equals a,t,g, or c
  SITE (30386): n equals a,t,g, or c
  SITE (30387): n equals a,t,g, or c
  SITE (30388): n equals a,t,g, or c
  SITE (30389): n equals a,t,g, or c
  SITE (30390): n equals a,t,g, or c
  SITE (30391): n equals a,t,g, or c
  SITE (30392): n equals a,t,g, or c
  SITE (30393): n equals a,t,g, or c
  SITE (30394): n equals a,t,g, or c
  SITE (30395): n equals a,t,g, or c
  SITE (30396): n equals a,t,g, or c
  SITE (30397): n equals a,t,g, or c
  SITE (30398): n equals a,t,g, or c
  SITE (30399): n equals a,t,g, or c
  SITE (30400): n equals a,t,g, or c
  SITE (30401): n equals a,t,g, or c
  SITE (30402): n equals a,t,g, or c
  SITE (30403): n equals a,t,g, or c
  SITE (30404): n equals a,t,g, or c
  SITE (30405): n equals a,t,g, or c
  SITE (30406): n equals a,t,g, or c
  SITE (30407): n equals a,t,g, or c
  SITE (30408): n equals a,t,g, or c
  SITE (30409): n equals a,t,g, or c
  SITE (30410): n equals a,t,g, or c
  SITE (30411): n equals a,t,g, or c
  SITE (30412): n equals a,t,g, or c
  SITE (30413): n equals a,t,g, or c
  SITE (30414): n equals a,t,g, or c
  SITE (30415): n equals a,t,g, or c
  SITE (30416): n equals a,t,g, or c
  SITE (30417): n equals a,t,g, or c
  SITE (30418): n equals a,t,g, or c
  SITE (30419): n equals a,t,g, or c
  SITE (30420): n equals a,t,g, or c
  SITE (30421): n equals a,t,g, or c
  SITE (30422): n equals a,t,g, or c
  SITE (30423): n equals a,t,g, or c
  SITE (30424): n equals a,t,g, or c
  SITE (30425): n equals a,t,g, or c
  SITE (30426): n equals a,t,g, or c
  SITE (30427): n equals a,t,g, or c
  SITE (30428): n equals a,t,g, or c
  SITE (30429): n equals a,t,g, or c
  SITE (30430): n equals a,t,g, or c
  SITE (30431): n equals a,t,g, or c
  SITE (30432): n equals a,t,g, or c
  SITE (30433): n equals a,t,g, or c
  SITE (30434): n equals a,t,g, or c
  SITE (30435): n equals a,t,g, or c
  SITE (30436): n equals a,t,g, or c
  SITE (30437): n equals a,t,g, or c
  SITE (30438): n equals a,t,g, or c
  SITE (30439): n equals a,t,g, or c
  SITE (30440): n equals a,t,g, or c
  SITE (30441): n equals a,t,g, or c
  SITE (30442): n equals a,t,g, or c
  SITE (30443): n equals a,t,g, or c
  SITE (30444): n equals a,t,g, or c
  SITE (30445): n equals a,t,g, or c
  SITE (30446): n equals a,t,g, or c
  SITE (30447): n equals a,t,g, or c
  SITE (30448): n equals a,t,g, or c
  SITE (30449): n equals a,t,g, or c
  SITE (30450): n equals a,t,g, or c
  SITE (30451): n equals a,t,g, or c
  SITE (30452): n equals a,t,g, or c
  SITE (30453): n equals a,t,g, or c
  SITE (30454): n equals a,t,g, or c
  SITE (30455): n equals a,t,g, or c
  SITE (30456): n equals a,t,g, or c
  SITE (30457): n equals a,t,g, or c
  SITE (30458): n equals a,t,g, or c
  SITE (30459): n equals a,t,g, or c
  SITE (30460): n equals a,t,g, or c
  SITE (30461): n equals a,t,g, or c
  SITE (30462): n equals a,t,g, or c
  SITE (30463): n equals a,t,g, or c
  SITE (30464): n equals a,t,g, or c
  SITE (30465): n equals a,t,g, or c
  SITE (30466): n equals a,t,g, or c
  SITE (30467): n equals a,t,g, or c
  SITE (30468): n equals a,t,g, or c
  SITE (30469): n equals a,t,g, or c
  SITE (30470): n equals a,t,g, or c
  SITE (30471): n equals a,t,g, or c
  SITE (30472): n equals a,t,g, or c
  SITE (30473): n equals a,t,g, or c
  SITE (30474): n equals a,t,g, or c
  SITE (30475): n equals a,t,g, or c
  SITE (30476): n equals a,t,g, or c
  SITE (30477): n equals a,t,g, or c
  SITE (30478): n equals a,t,g, or c
  SITE (30479): n equals a,t,g, or c
  SITE (30480): n equals a,t,g, or c
  SITE (30481): n equals a,t,g, or c
  SITE (30482): n equals a,t,g, or c
  SITE (30483): n equals a,t,g, or c
  SITE (30484): n equals a,t,g, or c
  SITE (30485): n equals a,t,g, or c
  SITE (30486): n equals a,t,g, or c
  SITE (30487): n equals a,t,g, or c
  SITE (30488): n equals a,t,g, or c
  SITE (30489): n equals a,t,g, or c
  SITE (30490): n equals a,t,g, or c
  SITE (30491): n equals a,t,g, or c
  SITE (30492): n equals a,t,g, or c
  SITE (30493): n equals a,t,g, or c
  SITE (30494): n equals a,t,g, or c
  SITE (30495): n equals a,t,g, or c
  SITE (30496): n equals a,t,g, or c
  SITE (30497): n equals a,t,g, or c
  SITE (30498): n equals a,t,g, or c
  SITE (30499): n equals a,t,g, or c
  SITE (30500): n equals a,t,g, or c
  SITE (30501): n equals a,t,g, or c
  SITE (30502): n equals a,t,g, or c
  SITE (30503): n equals a,t,g, or c
  SITE (30504): n equals a,t,g, or c
  SITE (30505): n equals a,t,g, or c
  SITE (30506): n equals a,t,g, or c
  SITE (30507): n equals a,t,g, or c
  SITE (30508): n equals a,t,g, or c
  SITE (30509): n equals a,t,g, or c
  SITE (30510): n equals a,t,g, or c
  SITE (30511): n equals a,t,g, or c
  SITE (30512): n equals a,t,g, or c
  SITE (30513): n equals a,t,g, or c
  SITE (30514): n equals a,t,g, or c
  SITE (30515): n equals a,t,g, or c
  SITE (30516): n equals a,t,g, or c
  SITE (30517): n equals a,t,g, or c
  SITE (30518): n equals a,t,g, or c
  SITE (30519): n equals a,t,g, or c
  SITE (30520): n equals a,t,g, or c
  SITE (30521): n equals a,t,g, or c
  SITE (30522): n equals a,t,g, or c
  SITE (30523): n equals a,t,g, or c
  SITE (30524): n equals a,t,g, or c
  SITE (30525): n equals a,t,g, or c
  SITE (30526): n equals a,t,g, or c
  SITE (30527): n equals a,t,g, or c
  SITE (30528): n equals a,t,g, or c
  SITE (30529): n equals a,t,g, or c
  SITE (30530): n equals a,t,g, or c
  SITE (30531): n equals a,t,g, or c
  SITE (30532): n equals a,t,g, or c
  SITE (30533): n equals a,t,g, or c
  SITE (30534): n equals a,t,g, or c
  SITE (30535): n equals a,t,g, or c
  SITE (30536): n equals a,t,g, or c
  SITE (30537): n equals a,t,g, or c
  SITE (30538): n equals a,t,g, or c
  SITE (30539): n equals a,t,g, or c
  SITE (30540): n equals a,t,g, or c
  SITE (30541): n equals a,t,g, or c
  SITE (30542): n equals a,t,g, or c
  SITE (30543): n equals a,t,g, or c
  SITE (30544): n equals a,t,g, or c
  SITE (30545): n equals a,t,g, or c
  SITE (30546): n equals a,t,g, or c
  SITE (30547): n equals a,t,g, or c
  SITE (30548): n equals a,t,g, or c
  SITE (30549): n equals a,t,g, or c
  SITE (30550): n equals a,t,g, or c
  SITE (30551): n equals a,t,g, or c
  SITE (30552): n equals a,t,g, or c
  SITE (30553): n equals a,t,g, or c
  SITE (30554): n equals a,t,g, or c
  SITE (30555): n equals a,t,g, or c
  SITE (30556): n equals a,t,g, or c
  SITE (30557): n equals a,t,g, or c
  SITE (30558): n equals a,t,g, or c
  SITE (30559): n equals a,t,g, or c
  SITE (30560): n equals a,t,g, or c
  SITE (30561): n equals a,t,g, or c
  SITE (30562): n equals a,t,g, or c
  SITE (30563): n equals a,t,g, or c
  SITE (30564): n equals a,t,g, or c
  SITE (30565): n equals a,t,g, or c
  SITE (30566): n equals a,t,g, or c
  SITE (30567): n equals a,t,g, or c
  SITE (30568): n equals a,t,g, or c
  SITE (30569): n equals a,t,g, or c
  SITE (30570): n equals a,t,g, or c
  SITE (30571): n equals a,t,g, or c
  SITE (30572): n equals a,t,g, or c
  SITE (30573): n equals a,t,g, or c
  SITE (30574): n equals a,t,g, or c
  SITE (30575): n equals a,t,g, or c
  SITE (30576): n equals a,t,g, or c
  SITE (30577): n equals a,t,g, or c
  SITE (30578): n equals a,t,g, or c
  SITE (30579): n equals a,t,g, or c
  SITE (30580): n equals a,t,g, or c
  SITE (30581): n equals a,t,g, or c
  SITE (30582): n equals a,t,g, or c
  SITE (30583): n equals a,t,g, or c
  SITE (30584): n equals a,t,g, or c
  SITE (30585): n equals a,t,g, or c
  SITE (30586): n equals a,t,g, or c
  SITE (30587): n equals a,t,g, or c
  SITE (30588): n equals a,t,g, or c
  SITE (30589): n equals a,t,g, or c
  SITE (30590): n equals a,t,g, or c
  SITE (30591): n equals a,t,g, or c
  SITE (30592): n equals a,t,g, or c
  SITE (30593): n equals a,t,g, or c
  SITE (30594): n equals a,t,g, or c
  SITE (30595): n equals a,t,g, or c
  SITE (30596): n equals a,t,g, or c
  SITE (30597): n equals a,t,g, or c
  SITE (30598): n equals a,t,g, or c
  SITE (30599): n equals a,t,g, or c
  SITE (30600): n equals a,t,g, or c
  SITE (30601): n equals a,t,g, or c
  SITE (30602): n equals a,t,g, or c
  SITE (30603): n equals a,t,g, or c
  SITE (30604): n equals a,t,g, or c
  SITE (30605): n equals a,t,g, or c
  SITE (30606): n equals a,t,g, or c
  SITE (30607): n equals a,t,g, or c
  SITE (30608): n equals a,t,g, or c
  SITE (30609): n equals a,t,g, or c
  SITE (30610): n equals a,t,g, or c
  SITE (30611): n equals a,t,g, or c
  SITE (30612): n equals a,t,g, or c
  SITE (30613): n equals a,t,g, or c
  SITE (30614): n equals a,t,g, or c
  SITE (30615): n equals a,t,g, or c
  SITE (30616): n equals a,t,g, or c
  SITE (30617): n equals a,t,g, or c
  SITE (30618): n equals a,t,g, or c
  SITE (30619): n equals a,t,g, or c
  SITE (30620): n equals a,t,g, or c
  SITE (30621): n equals a,t,g, or c
  SITE (30622): n equals a,t,g, or c
  SITE (30623): n equals a,t,g, or c
  SITE (30624): n equals a,t,g, or c
  SITE (30625): n equals a,t,g, or c
  SITE (30626): n equals a,t,g, or c
  SITE (30627): n equals a,t,g, or c
  SITE (30628): n equals a,t,g, or c
  SITE (30629): n equals a,t,g, or c
  SITE (30630): n equals a,t,g, or c
  SITE (30631): n equals a,t,g, or c
  SITE (30632): n equals a,t,g, or c
  SITE (30633): n equals a,t,g, or c
  SITE (30634): n equals a,t,g, or c
  SITE (30635): n equals a,t,g, or c
  SITE (30636): n equals a,t,g, or c
  SITE (30637): n equals a,t,g, or c
  SITE (30638): n equals a,t,g, or c
  SITE (30639): n equals a,t,g, or c
  SITE (30640): n equals a,t,g, or c
  SITE (30641): n equals a,t,g, or c
  SITE (30642): n equals a,t,g, or c
  SITE (30643): n equals a,t,g, or c
  SITE (30644): n equals a,t,g, or c
  SITE (30645): n equals a,t,g, or c
  SITE (30646): n equals a,t,g, or c
  SITE (30647): n equals a,t,g, or c
  SITE (30648): n equals a,t,g, or c
  SITE (30649): n equals a,t,g, or c
  SITE (30650): n equals a,t,g, or c
  SITE (30651): n equals a,t,g, or c
  SITE (30652): n equals a,t,g, or c
  SITE (30653): n equals a,t,g, or c
  SITE (30654): n equals a,t,g, or c
  SITE (30655): n equals a,t,g, or c
  SITE (30656): n equals a,t,g, or c
  SITE (30657): n equals a,t,g, or c
  SITE (30658): n equals a,t,g, or c
  SITE (30659): n equals a,t,g, or c
  SITE (30660): n equals a,t,g, or c
  SITE (30661): n equals a,t,g, or c
  SITE (30662): n equals a,t,g, or c
  SITE (30663): n equals a,t,g, or c
  SITE (30664): n equals a,t,g, or c
  SITE (30665): n equals a,t,g, or c
  SITE (30666): n equals a,t,g, or c
  SITE (30667): n equals a,t,g, or c
  SITE (30668): n equals a,t,g, or c
  SITE (30669): n equals a,t,g, or c
  SITE (30670): n equals a,t,g, or c
  SITE (30671): n equals a,t,g, or c
  SITE (30672): n equals a,t,g, or c
  SITE (30673): n equals a,t,g, or c
  SITE (30674): n equals a,t,g, or c
  SITE (30675): n equals a,t,g, or c
  SITE (30676): n equals a,t,g, or c
  SITE (30677): n equals a,t,g, or c
  SITE (30678): n equals a,t,g, or c
  SITE (30679): n equals a,t,g, or c
  SITE (30680): n equals a,t,g, or c
  SITE (30681): n equals a,t,g, or c
  SITE (30682): n equals a,t,g, or c
  SITE (30683): n equals a,t,g, or c
  SITE (30684): n equals a,t,g, or c
  SITE (30685): n equals a,t,g, or c
  SITE (30686): n equals a,t,g, or c
  SITE (30687): n equals a,t,g, or c
  SITE (30688): n equals a,t,g, or c
  SITE (30689): n equals a,t,g, or c
  SITE (30690): n equals a,t,g, or c
  SITE (30691): n equals a,t,g, or c
  SITE (30692): n equals a,t,g, or c
  SITE (30693): n equals a,t,g, or c
  SITE (30694): n equals a,t,g, or c
  SITE (30695): n equals a,t,g, or c
  SITE (30696): n equals a,t,g, or c
  SITE (30697): n equals a,t,g, or c
  SITE (30698): n equals a,t,g, or c
  SITE (30699): n equals a,t,g, or c
  SITE (30700): n equals a,t,g, or c
  SITE (30701): n equals a,t,g, or c
  SITE (30702): n equals a,t,g, or c
  SITE (30703): n equals a,t,g, or c
  SITE (30704): n equals a,t,g, or c
  SITE (30705): n equals a,t,g, or c
  SITE (30706): n equals a,t,g, or c
  SITE (30707): n equals a,t,g, or c
  SITE (30708): n equals a,t,g, or c
  SITE (30709): n equals a,t,g, or c
  SITE (30710): n equals a,t,g, or c
  SITE (30711): n equals a,t,g, or c
  SITE (30712): n equals a,t,g, or c
  SITE (30713): n equals a,t,g, or c
  SITE (30714): n equals a,t,g, or c
  SITE (30715): n equals a,t,g, or c
  SITE (30716): n equals a,t,g, or c
  SITE (30717): n equals a,t,g, or c
  SITE (30718): n equals a,t,g, or c
  SITE (30719): n equals a,t,g, or c
  SITE (30720): n equals a,t,g, or c
  SITE (30721): n equals a,t,g, or c
  SITE (30722): n equals a,t,g, or c
  SITE (30723): n equals a,t,g, or c
  SITE (30724): n equals a,t,g, or c
  SITE (30725): n equals a,t,g, or c
  SITE (30726): n equals a,t,g, or c
  SITE (30727): n equals a,t,g, or c
  SITE (30728): n equals a,t,g, or c
  SITE (30729): n equals a,t,g, or c
  SITE (30730): n equals a,t,g, or c
  SITE (30731): n equals a,t,g, or c
  SITE (30732): n equals a,t,g, or c
  SITE (30733): n equals a,t,g, or c
  SITE (30734): n equals a,t,g, or c
  SITE (30735): n equals a,t,g, or c
  SITE (30736): n equals a,t,g, or c
  SITE (30737): n equals a,t,g, or c
  SITE (30738): n equals a,t,g, or c
  SITE (30739): n equals a,t,g, or c
  SITE (30740): n equals a,t,g, or c
  SITE (30741): n equals a,t,g, or c
  SITE (30742): n equals a,t,g, or c
  SITE (30743): n equals a,t,g, or c
  SITE (30744): n equals a,t,g, or c
  SITE (30745): n equals a,t,g, or c
  SITE (30746): n equals a,t,g, or c
  SITE (30747): n equals a,t,g, or c
  SITE (30748): n equals a,t,g, or c
  SITE (30749): n equals a,t,g, or c
  SITE (30750): n equals a,t,g, or c
  SITE (30751): n equals a,t,g, or c
  SITE (30752): n equals a,t,g, or c
  SITE (30753): n equals a,t,g, or c
  SITE (30754): n equals a,t,g, or c
  SITE (30755): n equals a,t,g, or c
  SITE (30756): n equals a,t,g, or c
  SITE (30757): n equals a,t,g, or c
  SITE (30758): n equals a,t,g, or c
  SITE (30759): n equals a,t,g, or c
  SITE (30760): n equals a,t,g, or c
  SITE (30761): n equals a,t,g, or c
  SITE (30762): n equals a,t,g, or c
  SITE (30763): n equals a,t,g, or c
  SITE (30764): n equals a,t,g, or c
  SITE (30765): n equals a,t,g, or c
  SITE (30766): n equals a,t,g, or c
  SITE (30767): n equals a,t,g, or c
  SITE (30768): n equals a,t,g, or c
  SITE (30769): n equals a,t,g, or c
  SITE (30770): n equals a,t,g, or c
  SITE (30771): n equals a,t,g, or c
  SITE (30772): n equals a,t,g, or c
  SITE (30773): n equals a,t,g, or c
  SITE (30774): n equals a,t,g, or c
  SITE (30775): n equals a,t,g, or c
  SITE (30776): n equals a,t,g, or c
  SITE (30777): n equals a,t,g, or c
  SITE (30778): n equals a,t,g, or c
  SITE (30779): n equals a,t,g, or c
  SITE (30780): n equals a,t,g, or c
  SITE (30781): n equals a,t,g, or c
  SITE (30782): n equals a,t,g, or c
  SITE (30783): n equals a,t,g, or c
  SITE (30784): n equals a,t,g, or c
  SITE (30785): n equals a,t,g, or c
  SITE (30786): n equals a,t,g, or c
  SITE (30787): n equals a,t,g, or c
  SITE (30788): n equals a,t,g, or c
  SITE (30789): n equals a,t,g, or c
  SITE (30790): n equals a,t,g, or c
  SITE (30791): n equals a,t,g, or c
  SITE (30792): n equals a,t,g, or c
  SITE (30793): n equals a,t,g, or c
  SITE (30794): n equals a,t,g, or c
  SITE (30795): n equals a,t,g, or c
  SITE (30796): n equals a,t,g, or c
  SITE (30797): n equals a,t,g, or c
  SITE (30798): n equals a,t,g, or c
  SITE (30799): n equals a,t,g, or c
  SITE (30800): n equals a,t,g, or c
  SITE (30801): n equals a,t,g, or c
  SITE (30802): n equals a,t,g, or c
  SITE (30803): n equals a,t,g, or c
  SITE (30804): n equals a,t,g, or c
  SITE (30805): n equals a,t,g, or c
  SITE (30806): n equals a,t,g, or c
  SITE (30807): n equals a,t,g, or c
  SITE (30808): n equals a,t,g, or c
  SITE (30809): n equals a,t,g, or c
  SITE (30810): n equals a,t,g, or c
  SITE (30811): n equals a,t,g, or c
  SITE (30812): n equals a,t,g, or c
  SITE (30813): n equals a,t,g, or c
  SITE (30814): n equals a,t,g, or c
  SITE (30815): n equals a,t,g, or c
  SITE (30816): n equals a,t,g, or c
  SITE (30817): n equals a,t,g, or c
  SITE (30818): n equals a,t,g, or c
  SITE (30819): n equals a,t,g, or c
  SITE (30820): n equals a,t,g, or c
  SITE (30821): n equals a,t,g, or c
  SITE (30822): n equals a,t,g, or c
  SITE (30823): n equals a,t,g, or c
  SITE (30824): n equals a,t,g, or c
  SITE (30825): n equals a,t,g, or c
  SITE (30826): n equals a,t,g, or c
  SITE (30827): n equals a,t,g, or c
  SITE (30828): n equals a,t,g, or c
  SITE (30829): n equals a,t,g, or c
  SITE (30830): n equals a,t,g, or c
  SITE (30831): n equals a,t,g, or c
  SITE (30832): n equals a,t,g, or c
  SITE (30833): n equals a,t,g, or c
  SITE (30834): n equals a,t,g, or c
  SITE (30835): n equals a,t,g, or c
  SITE (30836): n equals a,t,g, or c
  SITE (30837): n equals a,t,g, or c
  SITE (30838): n equals a,t,g, or c
  SITE (30839): n equals a,t,g, or c
  SITE (30840): n equals a,t,g, or c
  SITE (30841): n equals a,t,g, or c
  SITE (30842): n equals a,t,g, or c
  SITE (30843): n equals a,t,g, or c
  SITE (30844): n equals a,t,g, or c
  SITE (30845): n equals a,t,g, or c
  SITE (30846): n equals a,t,g, or c
  SITE (30847): n equals a,t,g, or c
  SITE (30848): n equals a,t,g, or c
  SITE (30849): n equals a,t,g, or c
  SITE (30850): n equals a,t,g, or c
  SITE (30851): n equals a,t,g, or c
  SITE (30852): n equals a,t,g, or c
  SITE (30853): n equals a,t,g, or c
  SITE (30854): n equals a,t,g, or c
  SITE (30855): n equals a,t,g, or c
  SITE (30856): n equals a,t,g, or c
  SITE (30857): n equals a,t,g, or c
  SITE (30858): n equals a,t,g, or c
  SITE (30859): n equals a,t,g, or c
  SITE (30860): n equals a,t,g, or c
  SITE (30861): n equals a,t,g, or c
  SITE (30862): n equals a,t,g, or c
  SITE (30863): n equals a,t,g, or c
  SITE (30864): n equals a,t,g, or c
  SITE (30865): n equals a,t,g, or c
  SITE (30866): n equals a,t,g, or c
  SITE (30867): n equals a,t,g, or c
  SITE (30868): n equals a,t,g, or c
  SITE (30869): n equals a,t,g, or c
  SITE (30870): n equals a,t,g, or c
  SITE (30871): n equals a,t,g, or c
  SITE (30872): n equals a,t,g, or c
  SITE (30873): n equals a,t,g, or c
  SITE (30874): n equals a,t,g, or c
  SITE (30875): n equals a,t,g, or c
  SITE (30876): n equals a,t,g, or c
  SITE (30877): n equals a,t,g, or c
  SITE (30878): n equals a,t,g, or c
  SITE (30879): n equals a,t,g, or c
  SITE (30880): n equals a,t,g, or c

SEQ ID NO: 10180 - DNA, 131 bp, Homo sapiens
agtcccagctactcgggaggctgaggcaggagaatggcgtgaacccgggaggcagagcttgcagtgagccgagatcgcgccactgcactccagcctgggcgacagagcaagactcagtctcaaaaaaaaaa

SEQ ID NO: 10181 - DNA, 842 bp, Homo sapiens
atctgttaaggtttgttttcttgcccagattgtaatctgtcctggtgaatgttccatgtgaccctgagaagaatatgggttctgctgttgttaatgaagttgtctttcgacatccattatatccagttggttgatggtgttgctgaactcaactacgtccttactgattttctgtctctgtccatttctgatagagaggtgttaaaaatctccaactgtaacagtggattcatctatttctccttgccattcttttgctttctgacatgtattttgacactctgtggttaggcatctaaacattaagagctaaacctatagataaaactcttagaagcaagcatatgaggaaagcttcatggtattggatttggcaacgatgtcttagatgtgacaccaaaagcacaggcaacaaaagaaaagataaattggactgtatcaaaattaaaagctcctatgtatcaaaggacacaatcaacacagtgaaaaggcaacccactatgcagaaaacatttgcaaatcatgtatctgataaggggtaatatccagaatagataataaagaactcccacaactcaataacaaaaaaactctgattttaaaaattagcaaaggtcttaaataggtatttcttcaaaaatgatgtacaattagtcaataagcacatgtaaagatgtccaacatcactaattattacagaaatgtaagtcaaaaccacaatgagatgccacgtcacacccgtaaggattgctactattcaaaaaacaaagtaacaagtgttaaggatgtagagaaatcggaacttttgtgcactgctggtaggaatgtaaaatggtacagct

SEQ ID NO: 10182 - DNA, 5775 bp, Homo sapiens; identical to SEQ ID NO: 5638

SEQ ID NO: 10183 - DNA, 1160 bp, Homo sapiens
ctttttttttttttttttaatttaaaacagtgaggtttatttcacatgtatatttttgtctccccaccatttccatgtctgaccaccactactactatggcctatcataacattccatacatatttaaaaccaagcaaagggtggagttgcatctttaaaaactaaacaggtattttggacaacacattcttggcaatggaacctggacaacatttatcaaacacagtagggaaagttctcactctgcattataaaaaggacagccagatatcaactgttacagaaatgaaatgatggaaaatttttaacaaattgtttaaactattttcctaaagagacttcctccactgccagagatcttgaatagcctcctgatcaatcatccagaagcaattcttcacataattaatgaacttggcttctactttgggaagagaaccaccttttcctatacttgcttgcatttttgctttaagtgcaaaggacctacagaactaggtccttttggtgttttaggagttttttcctgtttttttgaaggattcttgtccttttgatcttggtgttgatgatgcttttgagtcttttccattctgatttgacttttatgcatttctggctggagtatcttgtatagatttcttcactggtgctttttcttcagcttcctcatcatcaaactcatcatcatcatcttcatcatcttcagcagcagcaagttttacttttttctttggaaccttgctaccacctccaggggtagactgctttccagatatacttcaagagtttcacatcctcctcttcatcttctgactctgcatcttcctccacagctactaattgctgtcaactaatatgcactggccctgaagcacacatcaaccgacagaccactggtgatgttatttcaaagcccccaagggaaaccattggctgtacattttcaaagttgccagtgttactttaattggactgcctttgtaattcattgcctctgcttcaataatgtgcaattcatcctttgcaccagcaccagcccctaaactgaacgttctttaagataactggtgctcattttcatcattatccatcttaaagtgataatctttgtcggcctttagttcacaaccgaaaagatagttctggggcctcaggg

SEQ ID NO: 10184 - DNA, 738 bp, Homo sapiens; identical to SEQ ID NO: 6484

SEQ ID NO: 10185 - DNA, 2261 bp, Homo sapiens
atcagagaaacctgggcatgtctatgcgtgtggaacgttccaccctggatcaggtgaagaaacgttttgaggtcaacaagaagaagatggaagagaagcagaaggattatgattttgaggaaaggatgaaggagctcagagaagaggtaagggtctcctatccttcccctctcccccagatttgagttttatgttatgaatcatgggagaccctgtcctcatcccactcctactcccacccccagagttgtatctcctgagttctgtatattagcggaaacatttgttgcctttgtttaggattctcatgatctgaaggaaatggctctgaaactacttttttctcctagactctctgggccttatttttttttttgtaatttaaaaaaaaattttttttttttttggtcatacagatatttctcaacttctgatggggttacctactgataaacctatcatcaagttaaaaatatcataagtcaaaaatacataatacacctaacctactgtagtttagcctagcctaccttaatgtgctcagaacacattagcctacaattgacccaaattatctaacacaaagcctattctataataaagtattcatctcattaatttattgaatactgtactgaatgtgaaaaacaatggttgtatggatacttgaagtacagtttcaaatgcatgtcagtttttcaccattataaaattgaaaaatcttgtcagcatcataagttgaggactgtctcatctgtattctttgatttaatttttttaaaagactaaactttttttagaggagtttaggtttgcaacaaaattgagagggagttataaagatttcccatatacccactgtcccccacaacatgcatagcctcccccataatttttttttttttttaactgcaagaggaattaactaaatgtacctagtcctaaagagacccatgaaatcaggctgactgggtcaaaattctgtttcttccacttactggctgtgaatcttgggcaagttatataacctctttgtgcctcaatatccccatattagagatcttaatatacatgaagtactcagagcaatttctggcatgtactgcatgccccagaatgttagttgttgttacaaacaacatttggctgaggagtctaaactgattctgagtgatttttccctccaggaggaaaaggccaaagcgtacaagaaagagaaacagaaggagaagaaaaggagggctgaggaggacttgacatttgaggaggacgatgagatggcagctgtgatgggcttctctggctttggttccaccaagaagagttactgaggctttctgtgcttggcctgactttggcctatgctggacctaactttgcgtgtgtgtgtgtgtagtagggggtcatttctttttgggtaatgggaaagttcttaagagtgtcaatggggagggatagagggtgggggctcatggtttccctctactttgggagagggcacagattgcagaggtaatgctgtggcatattgcttctgcctcagtgtatcactggagtcacaggaccctgcccacctgagttcccaataaagaaaaacctccccttctgaggctgctttcccaaaactccccctgcatctttatctcttcatctatcccacctcttgtctgaacatcccacctttatcctgtgttctgcctttgttttaattttaactcatgttcatcctgcaacagaagcattctctaggtcccagtttccagttgattgcatatccttgatcagccctttttcccatcctgccctatggttctctagccacctgtgcatgcatgtgtatttctgcctggttctatggtgtgtggatgtgtgtgcatgaatctgtcatatagagggggtccgagctggaatcctagagcattgctgccctggggcctgatgttcttggcttcctcagagcatgtaacaggaaattaaatgggatgagtgtttggtgtggtttgtgtctgatgagttttttaacattcaggtgtagattgtttcagcttctcatgtttcattttcctgaagatttatgtttttgtctaccttgtgagcaggcttttggaagaacctgtttgatgcaaaaaagaaaatgaaaaacaaaacaaaaaatccccaaaaccttattatgggagcccgtcggtcttagaagctgtttgacatgtataataaatggcattgactgggcctgttttacatttggtgagaacattccataa

SEQ ID NO: 10186 - DNA, 15261 bp, Homo sapiens
atttccggctcctcccggaagtgccgaagctggctactaagggaacttgggaggatcccacctcagccttcgtgactagtgaggtgcgcaaacgcccgagttttccctggtgcgcgggttccgcctttgcagtgccctccacccttcctggtgtctgacccgcctccttcccaggccttttgttcctgtcccggaaagccggcgtcctgccgcgcgatgcccctgctcggacttcttcccaggagggcctgggcttcgctgctcagccagctcctgcgaccgccctgcgcttcgtgcaccggggcggtccgttgccaaagccaggtgagcgagacagaattatctctggtctgtcccagcagggtctccagatctgaacgcatagcctcgcggcctgtattccagtagtgttacaatcggtttttatcgagtgcccactatgtactgacactgaactaagcgatttggatgcctggtcatttaatccttggagcaatcttgagaggttggagttttgatttccattctgcagttgaggaaacggaggctgcaagattaaatgaatgacttatacacggatatgtagtaagggagtattttaattcatatccacactttttcctgaaactcttggactcaaacagtaacatttttaagcgaaatatatgaatattcctagtaaatgagatgactaaagatcagaagtagactgagttcgtcttagaatttacctcaaaatgaatctcagaaaaacattttcagatgtcagagagttttggattttggaattgcagataagggattgtgtacttgaacttggacttctcttagggcagataatcgccatagtatggaaccaccacatcctctatttttggaagggcatacagcgtgctggtaatgtcactgattaagttttgccttacttcggaaagattctaatgctctcttagcagatgctttgtgctatcgtgaacaatagggcacagatcttttattgatattcaatcacagcatcttatcagtctgagttttttagttcattcaagaaatccatatcttatcattccacaggcttgttctgtgtccttgagctggttcccttgtcttcaagttacagttttcctctctctaaacctgataaccagtgctaccttattaaaaattattatttttttgtccgggcacagtggctcatgcctgtaatcccatcactttgggaggccaagggtggtggatcacctgaggtcaggagtttgagaccagcctgacctatatggcgaaaccccgtatctactaaaaatacaaaaattagccgggcgtggtggcatgtgcctgtaatcccagctactcgggaggcagagacaggagaattgcttgaacccgggaggcggaggttgcaggagctgagatcgtgccactgcactccagcctgggcgacagagtaagactctatctgaaaaaaaaaaaaaaattatttttgctctttcagtaggaacggtgacctggagaagatcaccataatccctacccctgaatggttggtgttggtagtggtgggttgttcagtgccttcattattctcagattcttaaagtatttgagaatattaaaaatgcggctgagctctgtggctcatgtctgtaatcccagcactttgggaggctgaagcggttggatcacgaggtcaggagttcaagagcagcctggccaacatggtgaaaccccatctctactaaaaatacaaaaattagctgggcgtggtggtggcgcgcctgtagtcccagctactcgggaggctaaggcaggagaattgcttgaaccaggaggcagagattgcagtgagccgtgattgtgccactgtactccagcctgggcaacagaccgagactctgtctcaaaaaaaaaaaaaaaatccatatacagtgaggaagcttgtgtggtgaagacctgacctcatatatattacacgtgtaattgtaaatacaacatagattctttggggtgggactgagattgggatagatgaaatggtgctttggcttcctgttgctcagggtgaagagtctttgcaggttggtggtcaacagggtcagagatgccacaggtctggccagtgtccagagaagccacatctcacattcattcttctgccaggttgcagaggcagtgttaacatcccaactgaaagcacatcaagagaaaccaaattttattatcaagaccccaaaggtaatactttttgcctaccctatcccattagagtgccttggaggactgacctctgccttgcatgtctctctgaccccttttaatgttctttacagtaaattttaaaaatatatactattcttgagatactaggtgcggctcagagtcatttgaactcagtagatttcagctccagacctgagattacataataagtgtagtttaactccttgtctgaaatggacttattttttgtttttgttttcactatggctgcttttggtttccagggtaccagggatcttagtcctcagcatatggttgtgagggagaaaattcttgatttggttatcagctgctttaaacgtcatggagcaaaggggatggacaccccagcatttgagctgaaggtaaggggagaagaaagagtacgtgcaacctcactcacttcttcaatggcgttcagtgtcccaaagggcttctcatctgtgttttggagtcatgctttcaactgtggctcattctgtttgacccctataggaaaccctgactgagaagtatggagaggactctgggctcatgtatgatctgaaggatcaaggtggagagctgttgtccctccgctatgaccttactgtatccttttgagtactggagcctgacctgtctctttccaaatccagcgggctttctctgacaaaagtggagaacgtgactttgggatcttagaggtccattgcctatacttctagtttctcccagaaggcagttctgctacggaagcctggcctggagccctgtcatttaactctagtgtgtatcataatcctttgggggagcttgcagaagcacagacatttggctgcagtcccagagattcttagctaattctgtagctggaatggggctcaataatttgtattaaaaaattgttttttttggccagacacgtggctcacgcctgtaatccaagccctttgggaggctgaggcaggtggatcacctgaggtcaggagttcaagaccagcctggccaatatagtgaaaccccatctctactcagctcctgctgagctctggggctctcaggttctgagtctagtttgggactgactgtcaccttgtctccacagatctcttttgacgtaaaaagttagctggctgtggtggcaggtgcctgtaatcccagctactagggaggctgaggcaggagaatcacttgaacccaggaggcagaggttgcagtgagccgagattgcgccattgcactccagcctgggtgacaagagcaaaactctgtctcaaaaaaaaaattttttttgtggagatgggtgtctttgttgcccaggctggttgtaaactcatcgtttcaagtgatcctcccatcttggcctcctaaagtgctggggttacgggtgtgagccactgcatctggcctacagtctgcattttaaacaagcatcgtgggtaattaagatgcatgtagtcctttccctgcactttcagaaccagtagcttagaagttgttaggcaaatccaagttctgaagcttgactattttgagatggttcggaatcgatctgaatgggcagaaagacctgaagttagttcttgggtcacttctatctctacttgccttgctttctgctgaacttttagttttgctaggtgagattccttcatttgacactattcaatatatattgaattccaagcactgctaggccttggggatagtggaaaaaagggaaggtccttgttcttaccctagtggatgagatccagttgatataggcccagtcctccctaatgtctgtatactgggcctaatctttggatgcagtatccctcttccttaacccatttatgtgaggttccctttgctcgttatctggccatgaataaggtgaagaagatgaaacgttatcatgttggaaaggtgtggcggcgagagagcccaaccatagtccaaggccgttatagggagttctgccagtgtgtaagtgacctgatgggagcagcacagtttgatagttctaggggccacaaccttgaaactggctggataatggatgttttttcccatctttttctttgctgtaggattttgacattgctggtcagtttgaccctatgatccccgatgcagagtgtttgaagatcatgtgtgaaatcctaagtggattgcagttgggagactttctcattaaggtgaggccagggctgagaactgtgggagaagtctggatttggcctaatactgtttatgcaagtcccaaacttgggtgactccaacccttaagcctgcaactgtaggactttcctagtaaagctgttgtatttcctatatgtctgtactcttcctgtgaaatttccatcctttttgtgtgtcaggaaagtaggtactgccattgttttgagtggaagggcattgacaagcacttgggtcactgacattgagttctcaggtaaatgaccggcggattgtggatgggatgtttgctgtctgtggtgttcctgaaagcaagttccgtgccatctgctcctccatagataaactagacaaggtaacaaagaagacatacttcagtagaccctatctagcttctgccctgccctcaaatccataccactagtgaaaaataaggagattgtggctggaagtgggctattttggggtggaaggtaaggaggcatactctgaaggaagatctgagtcatgctatacagtggggattgtgactggatttcttaagctgtctctgactttgctgagtatacagttagctacttgtgatgtatatactgaatggaagttgagttgtcctttttcagtttgagaaagaaagatcttggggctgggctaatgtttgggtgtttatgcagatggcttggaaagatgtgagacatgagatggtggtgaagaaaggcctggctcctgaggtggctgatcgaattggggactatgtccagtgtcatggtaagaaccagggttttcagagctgtgatagaaccaggctgaaggtgacatgtgctcaaattctacctctgaaacaactcttttctgtagatatgctaagctccagggcctgtcctgaatttaatttctcttttacttattgtaacgactttgtgtcttcagatggcaaagctagaggcaaaggaggagggtcttgtcatgtgagactgggatctttttttttttttttttttttttaaagaaaatgaggaagactagctagagcacattagggataattttgaatgaaacacatgtgagtgaacagcagagactttatttctctccaggtggggtatccctagtagagcaaatgtttcaggatcccagactatcccagaacaagcaggccctggagggcctgggagacctaaagctgctatttgaatacctgactttatttggaattgctgataaggtaagctgaattgcaaatggacctcctgctgagctctagggctctcagggtcccgagtctagtttgggactgactgtaatcttgtccccacagatctcctttgacctcagcctggctcggggcctagactactatacaggagtgatctatgaagcagtgctgctgcagaccccaactcaggctggggaggagcccctgaatgtgggcagtgtggctgctggtgggcgctatgatgggctggtgggcatgtttgaccccaagggccacaaggtgccatgtgtgggactcagcattggggttgagcgaatcttctacattgtggagcagaggatgaaggtaggtcctagataggtgtgaggtggggctggagacctaaaaaccctcctgtttctggaggtgtagttggagtggttttctgatgattctttttgtcttgatttttggaattgctggtggaaaggaggtttttattagttttactttcttctctcttattagaccaaaggtgagaaggtgcggactacagagactcaagtgtttgtggccacaccacagaagaactttctccaagaacggttgaagcttattgcagagctttgggattctggaatcaaggtatggtggagctgatatctgagccatctgggtatgtgtggaatttaggacccagggctatatctatcttatgtctggggtggaactcaaaacctttttagtctgctagctactactggctactagattggctttttagggtaggcggactagccacttatctctggctttcttggatatccatgttcctgaggtttgttgctgtgttcacttctaagtcccttactctgtcttgatccttttcaggcagagatgctatacaagaacaaccccaaactattaacccagctgcactattgtgagagcacaggcattccactggtggtcattattggtgagcaagaactgaaagaaggggtcatcaagatccgttcagtggccagcagagaggaggtgagtggcggcagcagaaatagaagggacgaagtgtttctgcctttcccagattctgtaagaaatatgcatcttctggctgagaaattatcttcatggttaatagtggtagagatgaacaaacactcactcaagatgaccattgctgcctgtgagtattgactgggtggccagaagaaagacaaatgaaatccgaatgggtattttgagactaatcaacataatagacatagatcaggtgtttgaatccctttcatcttgagggtatacattcttcaggtcaacccacactactcctttctggttgtataagtaatgggagaagatgcagagtaaaacaaatctggaaaaacagtggctaaggagttagtatcactttctagtttatcacatgaggattctcttatgtttcaggtggccattaaacgggaaaattttgtggctgaaattcagaagcgactgtctgagtcttgatccttgcctgattcccatctgctgctctttgtagaaaaggtttcctctagaactgaattcctctggaattgagtgatggacttcacaacaactagccaggaagggtgacaagtaccttctgcctcctccattcttcctgggtgcagaactgtagaagaccctgaggactcctgggctagtgtgagcagctattctgcatgggtgcagatggctggatgtgaaagagacatgctctagctgcagaggcaaatttgaagtgccacggaacgttgtcaagaggtagtgagattgttgctgtgagcaaggctctgggagagtcacctcaggctcaggattctgaaccattgagatcagaaaccagatacttagccttctactgtagctacggaaccagattctggtgaatttgtccacaatcagccattggcctgtctggggagtttttggaagacagcaaagaggggcaatggctgctttcagctttgaggacagatgctatcctaagggcatggcagtacccatgttgatttgacatctctctagcccatccattgcttacagtagaagagtggggctgtatgcttgataatcttgaacattgaacttaatagatgacttgacaaggtagagatctgatattttgagattttggagaccatttcctgtgccagaatcactgctctattccataccgtgccatggaggctgttttagaagtggttggataacatgttaaataaaatattaagtgtagtagtttgggtaatttgttattgttatcaagggctttgtttgcatagaccatagaaaatgcttgagtgtacattggagaattctgtgaggtagaagtaacctccctgggatgatgcttctgtattcagtgatgagcagccacagtttctccctctttccccgtctcctcaagaggtagtttttttgtttgtttgtttttagacggagtcttgctctgtcacccaggctagagtgcagtggcgtgatctcggctcactgcaacctccgcctctcaggttcaagagattctcctgcttcagcctcccgagtagccagctaatttttgtatttttagtagagacagggtttcaccatcttggccaggctggtctcaaactcctgacctcataatccacccacctcagcctcccaaagtgctgggattacaggcatgagccactgtgcccggccaagaggtagttttgttgctaaaaatcaacatatagtgagccggtatgccacagtgcttcactctagagtgttgatgactggcctttccaaatccaattatgctgattaaattatgttctactataaagttccccagatgatggaaaaataagtgaaccaaagggtggtagcattgcttcaaggaaaagagcccaagtgcaaaacatgctttttatatgtgcgtcgggaagggtgcctctgttgcaaacgtttcagtgtagtttagggtcatatccctagtgcatgcaggtgaatgagaggcatctagaccccctaatggcgcttcggccttaaaaaaggtttagaaattcttggcagtggacgcaaagttgctagactagatcagagaccactgttttgcgaacctcagtttccttgtttgtaaaatagttgaactaaatcttgaccctttaatgcttgttttgaaatccaaggcaaaaaacaattgcaagcgcccttacttccgtgttgcttcatactcctcttgcgcctgcgctgtctccttggagcagaggcggggccaacaagcctgttttagaaaccctccagtccttagctcgtttagaacacaagactccaagcttattggagggctatcttgccttacggctccaagccgctttttacggcgtttttcagctcgccattcacttcgctgtgaagatggcgtcgggcagcggggtaggtgttgtgtctgaggaggaggttttgcggggtggggaatggtttttcagacctgaatagagacaaactcctgcacccgactggcttcccgatatctcctcgagatcccagggttcaggttcaagaactccccagtaataggccttggcagagggtcagtagaatcgcggaggtttctcgggttggggtcttgaggctacctcagtcttctcgtacagtccaaagaggcttcgctttcaaaacgtcctgtagacacctggaccgcgagggcgcggttccctgcttctctaggggcccagacacggcgacggatcttgacgctttttcctccccacagacaaaaaacttggactttcgccgaaagtgggacaaagatgaatatgagaaactcgccgagaagaggctcacggaagagagagaaaagaaagatggtgggtgctaactacatcaagggctaagggtatcacagaggcgatgcgatgatggagagcgggtgggagttgaagtgcgctgccttcccacgcggtgtaagctctggcagagtgctgcttccctgggcctaggtttctgcatttacaaaatgagagcgaggaggtgggatgaagtaagtagttttgagatgctcttcagctctatttcactctgcttccttgcccaccctttgcttggctcgtttaatgctttcctgaagtacagagaagataacggcatccttagtagtgacagagaagttaagtagagtattttgctgctgtgcattaccgctatcagtgacccccctctttcccttgaaatttcttaagggagagaacattcctggcccaatcaagaccctcccatatagtctgagaaaagccggggaactttgcaggatctgtgattgtttcagctagagcttagtagtgctgtttctctgtgccttgtacatcagggagttggtgcttctctcctgtttaagagattgcataaagaaatgttttattttgtcatctgtttcaaacgtgtacattcttctttccctttacctccaggccaccttgcactcactaactctttcattttttatgtaacatgtaaaataaatagtgcttgacatgtaacaggcatttcctagatgttggtccccttttataaatttgcccagctctcagaaggttcctttccgttatgcctagggtatctgcctgaaagcattcttgaatgtccttgctcccgttttgaaaaagttgcttctagtaattcttcagaaattctcccccacaattcagttaatcaatgaatataaaacatactgtttttagatttgctggctttaaagtggagaaaagctgtagagttgaggattgcttatgattttttcctgtgttgagattctccccagctgctactttaagtgtctgttgtgtcctttcaggaatgattttgaaatgagtaagacctgaattttggatttcatgcattttttttcctttctggttgaggaactataatattgaagggacttccttccccattatgtttcaggaaaaccagtgcagcctgtcaagcgagagcttttacggcatagggactacaaggtggacttggaatccaagcttgggaagacaattgtcattaccaagacaacccctcaatctgagatgggagggtgagttgcttatcatttttcctctgcagccaagaatgcatctaataagccacctattttggttttaggaagtgttgaggaaggtccttggccccaggattacgtccttcttgcctgtaattctatctttatatttgtttttctgtgtctcccaaggtctcaagttgacatgatagtgtctctaggaatggtcactcagtgggtttcttcatgttattagcattggctgggcacagtggctcacgcctgtattcccagcactttgggaggccaaggcaggaggattgcttgagcccaggaattcaagaccagcctgggtaacacagtgagaccctgtctcaattaaaaaaaccaaaacaaacaaaaatcatactatgagcactacagctactactcaatatagtttttaaattttttattgccattgtacttgttatcaattctgatttactattaatattttaaaagggattatttgatctgtcagaagaagaaatgaaggaaaggactactgaggagatttctaggagagaaattaggtggagctagaatagagcctaggagttgttaatggtgaagaagaggggtttgaggttccagactagctgcaaaggctgtagttgttatggatgcctgattgtacaccttcttccaagactataacctataggaagaagggtcctacaagagcttgtcacccttttgccccccactgcttctctgtccagttaggttttctggcaggagagcaacacagatagcaatgagtgacacttctctgagctgcttagtaaacccactgttgtccattcctgtctgtattagttatctattgttatgtaaattaacaaattaacctaaagcttagcagcataaactacaccactcacagtttctttgggtaaggaatctgggagtggcttacctaggtggttctggctcagggtcttcatgaagctgcaatcaaggagttggcaaggtaggtctgcattcatatgaatcttaagtggggctggaagatctgcttccaagctctctcacatgcctgtggtttggaagcctaagttctttgccccatagacctttcttttttctttttcttttttcttttctttttttttttttttctgagacagagtttcactcttcttgcccaggatggagtgcaatggtatgatctcggctcaccacagcctcgcctcctgggttcaagcgattctcctgcctcagcctcccaagtagctgggattacaggcatgcaccacctgatttttttgtatttttagtagagacggggtttctccgtgttggtcaggctagtctcgaactcccgacctcaggtgatccgcccgcctcggcctcccaaagtgctgggattacaggcgtgagccaccatgcccggccaccccatagacctttctataagactgctcacaataaagcaactggcttccccagagcaagtaacccaaacaaagacagaaggcatggtttttaaaataacctaattttggaagatactacttttgacatattctattggccaaacagaccaactctggtacaaattgggaagagactacacagagtaggaataccaagagggtggggctcatcctggggctgtcttggaagatgactgctatactctctcgaaagctaaggctttatagaaatgaaggcttaacacttctaaaaagaagtttacctaaaaatttgagtttcttggttgaaaatgataagatccttaaaaccatatttgactcaggtgctgtttcttcctgttagatattactgcaatgtctgtgactgtgtggtgaaggactccatcaactttctggatcacattaatggaaagaaacgtaaggcttggaggtagcttgtgactagggctggaattgggttttggaggtggggtggaatggaagggtagctttttttttcttctttttactcatcaaaagatggctggagtaagaagggtagtttctactgggctcttttttgatgcccctattagaactctccagttgtttcagcacaggccgtcttttacttcattatgtaatatttctggaggccgtgaggtaagaggcctcattctggaggccatgaggctttcaacagcacccaaaccatgtgctgctcctggacccagctggccaagggagtttcttttagccataattatttttgctgtgtgttttatgagatgtcagagaagtcaggaaaataatttttgaggggctgaggatgttgtaatgaacttgccttcttcactgttgaccctatgcagatcagagaaacctgggcatgtctatgcgtgtggaacgttccaccctggatcaggtgaagaaacgttttgaggtcaacaagaagaagatggaagagaagcagaaggattatgattttgaggaaaggatgaaggagctcagagaagaggtaagggtctcctatccttcccctctcccccagatttgagttttatgttatgaatcatgggagaccctgtcctcatcccactcctactcccacccccagagttgtatctcctgagttctgtatattagcggaaacatttgttgcctttgtttaggattctcatgatctgaaggaaatggctctgaaactacttttttctcctagactctctgggccttatttttttttttgtaatttttaaaaaaatttttttttttttttggtcatacagatatttctcaacttctgatggggttacctactgataaacctatcatcaagttaaaaatatcataagtcaaaaatacataatacacctaacctactgtagtttagcctagcctaccttaatgtgctcagaacacattagcctacaattgacccaaattatctaacacaaagcctattctataataaagtattcatctcattaatttattgaatactgtactgaatgtgaaaaacaatggttgtatggatacttgaagtacagtttcaaatgcatgtcagtttttcaccattataaaattgaaaaatcttgtcagcatcataagttgaggactgtctcatctgtattctttgatttaatttttttaaaagactaaactttttttagaggagtttaggtttgcaacaaaattgagagggagttataaagatttcccatatacccactgtcccccacaacatgcatagcctcccccataatttttttttttttttaactgcaagaggaattaactaaatgtacctagtcctaaagagacccatgaaatcaggctgactgggtcaaaattctgtttcttccacttactggctgtgaatcttgggcaagttatataacctctttgtgcctcaatatccccatattagagatcttaatatacatgaagtactcagagcaatttctggcatgtactgcatgccccagaatgttagttgttgttacaaacaacatttggctgaggagtctaaactgattctgagtgatttttccctccaggaggaaaaggccaaagcgtacaagaaagagaaacagaaggagaagaaaaggagggctgaggaggacttgacatttgaggaggacgatgagatggcagctgtgatgggcttctctggctttggttccaccaagaagagttactgaggctttctgtgcttggcctgactttggcctatgctggacctaactttgcgtgtgtgtgtgtgtagtagggggtcatttctttttgggtaatgggaaagttcttaagagtgtcaatggggagggatagagggtgggggctcatggtttccctctactttgggagagggcacagattgcagaggtaatgctgtggcatattgcttctgcctcagtgtatcactggagtcacaggaccctgcccacctgagttcccaataaagaaaaacctccccttctgaggctgctttcccaaaactccccctgcatctttatctcttcatctatcccacctcttgtctgaacatcccacctttatcctgtgttctgcctttgttttaattttaactcatgttcatcctgcaacagaagcattctctaggtcccagtttccagttgattgcatatccttgatcagccctttttcccatcctgccctatggttctctagccacctgtgcatgcatgtgtatttctgcctggttctatggtgtgtggatgtgtgtgcatgaatctgtcatatagagggggtccgagctggaatcctagagcattgctgccctggggcctgatgttcttggcttcctcagagcatgtaacaggaaattaaatgggatgagtgtttggtgtggtttgtgtctgatgagttttttaacattcaggtgtagattgtttcagcttctcttgtttcattttcctgaagatttatgtttttgtctaccttgtgagcaggcttttggaagaacctgtttgatgcaaaaaagaaaatgaaaaacaaaacaaaaaatccccaaaaccttattatgggagcccttcggtcttagaagctgtttgacatgtataataaatggcattgactgggcctgttttacatttggtgagaacattccataa

SEQ ID NO: 10187 - DNA, 109 bp, Homo sapiens
agtagagatggggtttcaccatgttggctaggctggtctcaaacccctgacctcaggtgatccacctgcctcggcctcccaaagtgctgggattacaggcgtgagccac

SEQ ID NO: 10188 - DNA, 109 bp, Homo sapiens
agtagagatggggtttcaccatgttggctaggctggtctcaaactcctgacctcaggtgatccacctgcctcggcctcccaaagtgctgggattacaggcgtgagccac

SEQ ID NO: 10189 - DNA, 503 bp, Homo sapiens
tgggggttttgagcacaaatttctgtttgctttcatcaggacccagctgtgccttcagtttcaggagtttcgccacctcctcctcgatctgtggagggaaagaaggcgctgagctatccatctgtcactctcctccctcccccgccattcattcaatattcctccctcatcacatctctctgctcaggcctagctttgtttctctcgggacccaccccggatgtctccccacgcagcccactctcctccctacaagactggtcgcttccctcacatctctaccctatgtcccgaacaccctggctttacgtcctcccaggctttgccttggccctctcccctgctgcctaaatctcaccagctcggcgctggccttctgctgcttgaggcctcgcacgcgctctccctgaagtttcaccagctcctccagcgccgcacgctctgccatcccggctgtccacttgagccgcctgctgtctcgacctgcggtggttgccccagcc

SEQ ID NO: 10190 - DNA, 791 bp, Homo sapiens
aaaatctttgaatctgcaccaagtctcagaacagctctggccccggagtgctccgtccaggccgctgtgaaccggctgtccccgcgtctcctccacctcccctgacacaatcctggccccgactcagtccacccagggtgcagtgcagaggctgatacgcgccaggacttccttgccaagggcccggccacgtcacaaggccactgcacgcttttcgacatgcacctggaaatcgggaagggccatgctgcagttgcttctagttgagacgagaagagcgacaaggttgtgatccacgtggcaggtgttcagaaggctgggggcgggcagcgctggggagagccctgggtacttcgaggagaccccgaagggaggctgctcccacacctgcgccagtttccaccctctctgtgagcagggctgcggtcacctcccacatctgaagagaaccaacctgaggatttcacgctggctgcgtgccagaccagtccctgacaggttgtgcgaggcccttcgctggacagcccattgctggccactggacggagaggcagagggggctgaaattcgggcccatgcctctgtgagcgatgacggagcaacagctctccagcacgtgaagctctccagacagctgttcgtgagaagccagacagaggcctggggtctcagtccagatttctggggagtggggtgtccaagcgtgggccacgctgctgggagccacctagggaagcaggtcgcctgtttctatagtgacggtaataaaccaagtcaattttctatagtga

SEQ ID NO: 10191 - DNA, 1463 bp, Homo sapiens
gtgcagggggtgtctgtgggggggccctgctggctggactttgggtttctcctgagctccccttagcccccaagtcaggccacggaggcctgagtaggacccatgggctgtgtgtgtcactgcaggtggcgtgctcacaactgcactgctggtcggcaggtggccagggttgcaggcccgggcctcgggccccacctcctctggaggggtaggatctccttcgtgcagcccctgccccctaccctgttctccggagtgttggcagatctgagcccacggtcacgtgagaggagatgcctcttgcacactgagcccaggcccagctcacggagcaccctgcaggtggcagcggggcaccaggggctcattcctggtggcctcagtggcttctgtggacgactcagactcacatgagaagctgggaggagctccagctctgcaatcccgagagggcagagcgggggccctggccacaaccctgctccccacatacccgtctggcagaggctctgcctcccctctgcccatctctgcacaccaaggctgagcacagcacaaggcctcacggagagggtgaaaaggcactgccgtctccatctcagtgccaaggaatgcccctttcagaagccctcgtctgagaagtgctgccccttatgtagccccaggcattttaaaatctttgaatctgcaccaagtctcagaacagctctggccccggagtgctccgtccaggccgctgtgaaccggctgtccccgcgtctcctccacctcccctgacacaatcctggccccgactcagtccacccagggtgcagtgcagaggctgatacccgccaggacttccttgccaagggcccggccacgtcacaaggccactgcacgcttttcgacatgcacctggaaatcgggaagggccatgctgcagttgcttctagttgagacgagaagagcgacaaggttgtgatccacgtggcaggtgttcagaaggctgggggcgggcagcgctggggagagccctgggtacttcgaggagaccccgaagggaggctgctcccacacctgcgccagtttccaccctctctgtgagcagggctgcggtcacctcccacatctgaagagaaccaacctgaggatttcacgctggctgcgtgccagaccagtccctgacaggttgtgcgaggcccttcgctggacagcccattgctggccactggacggagaggcagagggggctgaaattcgggcccatgcctctgtgagcgatgacggagcaacagctctccagcacgtgaagctctccagacagctgttcgtgagaagccagacagaggcctggggtctcagtccagatttctggggagtggggtgtccaagcgtgggccacgctgctgggagccacctagggaagcaggtcgcctgtttctatagtgacggtaataaaccaagtcaattttctatagtga

SEQ ID NO: 10192 - DNA, 244 bp, Homo sapiens
ccaggctggagtgcagtggcaaactctcggctcactgcaagctccgtctcctgggttcacgccattctcctgcctcagcctcccgagtagctgggactacaggcgcccgcacccacgcccggctaatttttttgtgtatttttagtagagacggggtttcaccgtgttagtcaggatggtctcgatctcctgacctcgtgatctacctgcctctgcctcccaaagtactgggattataggcgtg

SEQ ID NO: 10193 - DNA, 319 bp, Homo sapiens
aagtcaattttcttttcttttcttttctttttttgagatggagtctggctttgttgcccaggctggagtgcagtggcacgatctcggctcactgcaagctccgcctcctgggttgacgccattctcctgcctcagcctcccgagtagctgggactaacaggcgcctgccaccacgcccggctaatttcttctatttttagtagagacggggtttcaccgtgttagccaggatggtctcgatctcctgacctggtgatccgcccgcctcggcctcccaaagtgctgggattacaggggtgagccaccgcgcccggccaaa

SEQ ID NO: 10194 - DNA, 1653 bp, Homo sapiens
tgccacggagatcacgtccagcggcttccgcctggcctggccacccctgctgaccgcagactcgggctactatgtgctggagctggtgcccagcgcccagccgggggctgcaagacgccagcagctgccagggaacgccacggactggatctgggccggcctcgacccggacacggactacgacgtggcgctagtgcctgagtccaacgtgcgcctcctgaggccccagatcctgcgggtgcgccgcggcccggtgaggcagggcgggggcttcgggcccggagtcgagggctgggcggccccacgcagctcgccgccctccccgccccagaggaggccgggcggagcgcatcgtcatctcccacgcacggccgcgcacgctccgcgtgagttgggccccagcgctgggctcagccgcggcgctcggctaccacgtgcagttcgggccgctgcggggcggggaggcgcacgggtggaggtgcccgcggccgcaactgcaccacgctgcagggcctggcgccgggcaccgcctacctggtgaccgtgaccgccgccttccgctcgggccgcgagagcgcgctgtccgccaaggcctgcacgcccgacggcccgcgcccgcgcccacgccccgtgccccgcgccccgaccccggggaccgccagccgtgagccgtaagccggcgtccccgcccacccgagagggccggcgcctacctgagggcccctgtgtcccgaacccggagcggaggcgcccaacccggcagacgggtgcaggcccggcctttccccacgcggactccgcgcgaccccggccctctccctgcggccgcaggcttccccgcctggcgcctgccctccagggctggggcctcgctggcgggaccccgcagcagccccggccccatccccgccccagagccgggcgtcgtgtgggtccgtgggtgataattgagagcgtcagacccaggactgttcagggaggagccccggtcagactcccacgtgtgaagaccgggccccaagtggcaagggctggcctggggcgggcagcttgggtcctggacgttgataggaagcggaaggggaatcgcgggaagctggcccaggtcaggtccgcaaaggcttctgaagaagaggaagggcgagtaggggcacctggacgctgatggtggccaggatgctcagctggccaggagggcagcacctgctggggacggtgccctgccttcatgcccaggacaccagctgggtccagctagcagccactgggaatcagaggaatggggcagagctgggcattcaggaccttgaggacaggtgaccccacccgcccaccgccactatcaggccccgggaccgcactgacaggaaaccttccgtcgtgagggagcacttcccaggggccgcagggacgacactctccagggaggccccagcaaccacaccatcttcttgctgtgagaggtctcaccccgggctacctcctgtcactactcactgccctggggtccgtgggcaagttgcccagggtgggggtgcctagccaggtgcagtccccgccccgcctagtcctcggcgtcacgcaatgctcacctcgcctcttccccactaacatcccagactttaaaattcagtaaatcagatgtacaccgag

SEQ ID NO: 10195 - DNA, 4625 bp, Homo sapiens
ccaggcgggccaggggtcgctgtactccctggaggccaccctggaggagccaccctgcaacgaccccatggtgtgccggctccccgtgtcaagaaaaccctggtgagtgatgaggctcttggggttccccgccccgaggccgagtaaagcagcagttggatgatgacgggtcaggtcaagacgcagggatctgaggtagctgctgccccaccttgagccacttcccaggccccgagggctggaaaccaagatgctatgaaggggaggatgccccggtgcaggccgtgcctcactgtccactgtgatggggtgattgccttaggggtggctctcatctgaggagcctccagctccatcttggccagatcttgctccccagatccagatccaggcccccagagcagcttcttcctctccctccagctctgcagcttccaagtcctggatgagctcggaagacacgtgctgctgcggaaggactgtggcccagtggacaccaaggttccaggtgctggggagcccaagtcagccttcactcagggctcagccatgatttcttctctgtcccaaaaccatccagacaacagaaacgagactttcagctcagtcatttccctgttgaatgaggatcccctgtcccaggtgaggagccctcagcttgaggagccctcagcttgaggagccagccgctgcctcatcacccttctcccttccctctggagtgggtttctctggtcagcctaaagactggtctgcctatccaggacttgcctgtgaagatggcttcaatcttcaagaactttgtcattacctataaccggacatatgagtcaaaggaaggtgaggacccagccttggctgtacctgttcctatcagaacaggactttccccccaacttggcaccttggtgtgtgggaggagaaagacaagaggcagtgtacctgttcaaggaccccataattcctgagctctccctaagccttcccagcctggcagccaccctgagtacctggccccttctcctaccttatcttcccgctcagaagccatgggtcttggccgggcgtggtggctcacctctgtaatcgcagtactttgggaggccgaggtgggcagattacctgaggtcaggagttcaagaccagcctggccaacatggtgaaaccccatctctactaaaaaaaaagtacaaaaattagccaggtgtggtggcgcacacctgtataccagctactcgggaggctgaggcaggaaaatcacttgaacctgggaggcggaggttgcagtgagcaaagattgtgccactgcactccagcatgggtgacaagcgaaaactctgtctcaaaaaaaaaaaaaagaagctctgcatctccatcactctggcagggtggaatggggcagaaggctggattttttgtgctggagagtccttgacaacatggcctttccccaccacctcttgtgggtggtgtcctttagaccccatttactgcttttgcacctgggaagtcatcacttcagtttggccctaaaagttgatcagacctcccactccatcacttgcatgtctggcccccacccctacctgctccccggggaaacccctgcctgctagccccaattgcccttccttttatctgcctggggtcgaacccctcctcttctgctccttggtcctcagaagcccggtggcgcctgtccgtctttgtcaataacatggtgcgagcacagaagatccaggccctggaccgtggcacagctcagtatggagtcaccaagttcagtgatctcacaggtagggatagtggccacagtcctcatggatccaggaagagacaggaccttgctcgcaaggcctctggtcaggtctggcttagaacactcttcctccccatgccctgcccacctttgcccgcagaggaggagttccgcactatctacctgaatactctcctgagaaaagagcctggcaacaagatgaagcaagccaagtctgtgggtgacctcgccccacctgaatgggactggaggagtaagggggctgtcacaaaagtcaaagaccaggttggacccctggaagtgagggtgggacatgggcactgcactggggctgacgaaggggcccggctctgactccaactccacccatctcttgtagggcatgtgtggctcctgctgggccttctcagtcacaggcaatgtggagggccagtggtttctcaaccaggggaccctgctctccctctctgaacagggtgagcatctcgctctactcctctgtccccagcctagcccctcaggagggcttcttgggaccagccttctgtctcctagagctcttggactgtgacaagatggacaaggcctgcatgggcggcttgccctccaatgcctactcggccataaagaatttgggtatgcattaatggggtcaggaggggcaaccggagccacttctccctgtacaagaagttacttcataatgggggggagacatgagcatgagagttacacagaactgggtccaggtcttaatgctgacccagccaggcgtggtggctcatgcctgtaattccaacactttgggaggccaacttgggaagatcacttaaggccagaagttcaggaccaggttgggcaacatagcaagaccccatctctacaaaaaattaaagacattagccaggcatggtggcttgcatctgtagtctcagctacttggggggctgaggcaggaggatcgcttgagcccaggaggttgaggctgtagtgaggcatgtttgtgccactgtactccagcctgggtgaaagactgctgggatgagctcttggtgaggagtcagaagttggagttgagttctgtctctgccacttttcttgctggctactggtccctcctccccatctctcccagcctcagatgtgtcatttctagaatgaagacattcttcagaggggatggcctgtggcctggggtggacgaggaatgtgaaacctcgcgtagagggcttagttcatttctggctgtgaatggcaaatgggagcctgcccttctctactcacccccaccgttccccaggagggctggagacagaggatgactacagctaccagggtcacatgcagtcctgcaacttctcagcagagaaggccaaggtctacatcaatgactccgtggagctgagccagaacgagcagagtgagtgaggggcagggtgaggtgaggtcaggtggggccggggcctgggtgcctactgatgccaccccttcccatctcagagctggcagcctggctggccaagagaggcccaatctccgtggccatcaatgcctttggcatgcaggtgaggccctagccccactgcacatgccccatctcttgttgacctccccgacctcttcttggagtcgatcccctactccttctccacctccagttttaccgccacgggatctcccgccctctccggcccctctgcagcccttggctcattgaccatgcggtgttgcttgtgggctacggcaaccgtgagttccgctgcctgtcctgcatccagccaggccacaggcaggggtgggatcacagcatctcaggtcctctagaggggaaatagggggaatgcctaggaaccctgtccttacccactgcctgggccatgaccagctgggcatcatctgtcctctctatggcagggaagctgagctgtgggagggtaaatattgatggcctaataacctgcaataggcgggtgggtgcgtgcttcctccctgccccagggcttctgcactgaggctggtaggtgggcccctcgctttctgctcttttcctagtccctgtcacacagtaggcccagtgcaagtatttgaagggtgcaaagtgattaaggctctgcctggagaattaaggaccctgatccttgcgctctgcactgcaccccaggctctgacgttcccttttgggccatcaagaacagctggggcactgactggggtgagaaggtgagtcttgctggcttggcccctggccctccagccgccatcctaccctggtgccctcaccagctccccctctcccccagggttactactacttgcatcgcgggtccggggcctgtggcgtgaacaccatggccagctcggcggtggtggactgaagaggggcccccagctcgggacctggtgctgatcagagtggctgctgccccagcctgacatgtgtccaggcccctccccgggaggtacagctggcagagggaaaggcactgggtacctcagggtgagcagagggcactgggctggggcacagcccctgcttccctgcaccccattcccaccctgaagttctgcacctgcacctttgttgaattgtggtagcttaggaggatgtcggggtgaagggtggtatcttggcagttgaagctggggcaagaactctgggcttgggtaatgagcaggaagaaaattttctgatcttaagcccagctctgttctgcccccgctttcctctgtttgatactataaattttctggttcccttggatttagggatagtgtccctctccatgtccaggaaacttgtaaccacccttttctaacagcaataaagaggtgtccttgtcccgag

SEQ ID NO: 10196 - DNA, 2895 bp, Homo sapiens
cagaagatccaggccctggaccgtggcacagctcagtatggagtcaccaagttcagtgatctcacaggtagggatagtggccacagtcctcatggatccaggaagagacaggaccttgctcgcaaggcctctggtcaggtctggcttagaacactcttcctccccatgccctgcccacctttgcccgcagaggaggagttccgcactatctacctgaatactctcctgaggaaagagcctggcaacaagatgaagcaagccaagtctgtgggtgacctcgccccacctgaatgggactggaggagtaagggggctgtcacaaaagtcaaagaccaggttggacccctggaagtgagggtgggacatgggcactgcactggggctgacgaaggggcccggctctgactccaactccacccatctcttgtagggcatgtgtggctcctgctgggccttctcagtcacaggcaatgtggagggccagtggtttctcaaccaggggaccctgctctccctctctgaacagggtgagcatctcgctctactcctctgtccccagcctagcccctcaggagggcttcttgggaccagccttctgtctcctagagctcttggactgtgacaagatggacaaggcctgcatgggcggcttgccctccaatgcctactcggccataaagaatttgggtatgcattaatggggtcaggaggggcaaccggagccacttctccctgtacaagaagttacttcataatgggggggagacatgagcatgagagttacacagaactgggtccaggtcttaatgctgacccagccaggcgtggtggctcatgcctgtaattccaacactttgggaggccaacttgggaagatcacttaaggccagaagttcaggaccaggttgggcaacatagcaagaccccatctctacaaaaaattaaagacattagccaggcatggtggcttgcatctgtagtctcagctacttggggggctgaggcaggaggatcgcttgagcccaggaggttgaggctgtagtgaggcatgtttgtgccactgtactccagcctgggtgaaagactgctgggatgagctcttggtgaggagtcagaagttggagttgagttctgtctctgccacttttcttgctggctactggtccctcctccccatctctcccagcctcagatgtgtcatttctagaatgaagacattcttcagaggggatggcctgtggcctggggtggacgaggaatgtgaaacctcgcgtagagggcttagttcatttctggctgtgaatggcaaatgggagcctgcccttctctactcacccccaccgttccccaggagggctggagacagaggatgactacagctaccagggtcacatgcagtcctgcaacttctcagcagagaaggccaaggtctacatcaatgactccgtggagctgagccagaacgagcagagtgagtgaggggcagggtgaggtgaggtcaggtggggccggggcctgggtgcctactgatgccaccccttcccatctcagagctggcagcctggctggccaagagaggcccaatctccgtggccatcaatgcctttggcatgcaggtgaggccctagccccactgcccctgccccatctcttgttgacctccccgacctcttcttggagtcgatcccctactccttctccacctccagttttaccgccacgggatctcccgccctctccggcccctctgcagcccttggctcattgaccatgcggtgttgcttgtgggctacggcaaccgtgagttccgctgcctgtcctgcatccagccaggccacaggcaggggtgggatcacagcatctcaggtcctctagaggggaaatagggggaatgcctaggaaccctgtccttacccactgcctgggccatgaccagctgggcatcatctgtcctctctatggcagggaagctgagctgtgggagggtaaatattgatggcctaataacctgcaataggcgggtgggtgcgtgcttcctccctgccccagggcttctccctgaggctggtaggtgggcccctcgctttctgctcttttcctagtccctgtcacacagtaggcccagtgcaagtatttgaagggtgcaaagtgattaaggctctgcctggagaattaaggaccctgatccttgcgctctgcactgcaccccaggctctgacgttcccttttgggccatcaagaacagctggggcactgactggggtgagaaggtgagtcttgctggcttggcccctggccctccagccgccatcctaccctggtgccctcaccagctccccctctcccccagggttactactacttgcatcgtgggtccggggcctgtggcgtgaacaccatggccagctcggcggtggtggactgaagaggggcccccagctcgggacctggtgctgatcagagtggctgctgccccagcctgacatgtgtccaggcccctccccgggaggtacagctggcagagggaaaggcactgggtacctcagggtgagcagagggcactgggctggggcacagcccctgcttccctgcaccccattcccaccctgaagttctgcacctgcacctttgttgaattgtggtagcttaggaggatgtcggggtgaagggtggtatcttggcagttgaagctggggcaagaactctgggcttgggtaatgagcaggaagaaaattttctgatcttaagcccagctctgttctgcccccgctttcctctgtttgatactataaattttctggttcccttggatttagggatagtgtccctctccatgtccaggaaacttgtaaccacccttttctaacagcaataaagaggtgtccttgtcccgag

SEQ ID NO: 10197 - DNA, 3073 bp, Homo sapiens
gggagagacccagagagggatctttattcagaagcacttggctggcttttctcttaggcccttgctccgagggacggatgggatcagccacagggtgcatcctctctccatcttgcatagagaacctcagtggttggggtcaaaggtcgctctccccatagagggcactggagaaggccacgtagtccagggctccagccggggccccggatcccttgtagggcaccatacggcggatgcagtactcggcctgcttggcagggagctcgcgccgcagctcctcgggggtgatgtagttctggggagaagaggcgttgaggacccacaggtcccgtgccctgccctagcccaccagcccctccaccgcctgggactcaccttgtctcctgccaagatcttgaaggaagctacaacttgctcagtcgtgtcagtctcggctgtctctcgggtcatgaagtctatgaaggcctggaaggtcaccaccccagctgcgttggggtccaccatggtcatgatgcgagcaaactccacttccccctgcagggatagaggccaggcactatgcccatgagcactaaagccaggagggctcccagtgtcccctcctggggactgtccaacctcagctagcagagccccagtaacaagggagttcccttcctccagagaccttagccctggctgtaggaagtcctttatggtaggctgaaatctgcatcctacccacagcaggaagcagatttgctccctggtcctgattttttttccagggccacacccgtttctgtagtgctgtttccctacaggtaaaaatgttgcaagctcagactttgggtccacacagaactgggtccaagtgagttttacctccctgagccttgctagcccctgtgtggatgtagtgaagatgcaggggatggtgtatgtgaagatgggaggtgcacagtaggtgatcagcacagaggagggggtactttgggactcctgggaaggagctggggagctctcaccaggtcatagcccatggagatgaggcaagctcggaagtcatcaggctccatcatcccattctgcttctgtagggggtgagtggttatcaggcttggtctccagcctccaccagcccccaagtgtcttaccccacagggccaggcccctgctgaccctgtcaaagtggttgaaggatgctcggaactcgttgagctgctcctggctcagtcccttggcgtctcgggtcagtacctggttctccacttcattgatggtgcgggcaatggaggtgagcagctgctcccagcccacgcggatgtgctggcggtcaggggacaggccactgtcagtgggcggccagtgcctggccactggctctagctccacatccagttcactgaatgaccctgggcaagtcctccccctcactgggcctccatccccatctggaggctccactgagtaacccacccccaccccagcagtccttcctgtcttttgataaccagctatggccaatcttggcctggttttggacggctttgtgactctggaagggtcactttccatcgctgggtcttaagggacctggccaagctgaactggggactctgctgggacacacatgctctgtccagctgtgatctccctgggcctcctcagccagtgctgcctccccactctcctgagagggtgtgatcccacctccatgctgtagacggtgtgcttattgtcgaacaccaggctctcctgcagcagctggtggtcaccctccagccggtcaatgttagtcttgtagttgataatgttctgctcctgctgccgtagcccagccatctgctcctccagagagccagctagccctgctgccagccgccccacttcctgcaggggttcccaggcagcatgagggctcccaactccctgtggcccagccctggccccatccccccaggttggacccactatcccagcccttacctccaccttcgcctggatccagggtccaatggcattggcctgggccgcaaactgtcgccggagcctctcgtttacctgctgccgtgccagctcctcctgcagtgtctggtcacagctgggcaccagctttcggacctgggaggagggcagttatgccagagccagctctgggggctgggaaatggctttaggggagatgggctccagcccctcaaacctcagcccctgttgctttgagccaacttgtctgggatatacgagaaagctcttgggcaagtcactaacccatgtgggcttcagttttctcatctgcaaaatggggctgatggcatcatttactaatatgggtggatttataaaagatgtccacacacaaggcttaattctacttcacatcagtcctgacaggagaatgctgctgttacagctcatcatatacagatgagcccgagacaggcaaggcgatttatccaatcccacgtggagtctgtggcagaccccacatctgaagatggactttattctccatatcttgggccacccgagatttcagggtggtcacagtatgcaggagggggtgggaggaaggctgcaggtggcactgaccatatcccacttggtgttgatgtcctgcgggctgagggtgatgtagggattggtggagcagggccgcagcccatacgtctggcagatcttctggatctcaccctggatgcccatgatggcacctcgctctcagtcagcctcgggcagtgttgccttgaactgatcgtgcgctgtcagcaggctctggggacgacaggcaggaagtgtcagctggtgtcccccacttaccacaggcaacagaaagggcagcagtgtgccccaggccacccaccagtcctgggcagtcctgacacaagaaccccggcctcctgtcttccagcccagcactcgggaactggggttttcctcccatccctatgccccaggagcctaaagttgtgggtggcagaatttggggccagctttcctgtcatcctatccatcccctgcaaccctggcacccacctgggtctcctccacagagtgtaccagccacacgtcctgcaggtcctccacg

SEQ ID NO: 10198 - DNA, 1198 bp, Homo sapiens
gggagagacccagagagggatctttattcagaagcacttggctggcttttctcttaggcccttgctccgagggacggatgggatcagccacagggtgcatcctctctccatcttgcatagagaacctcagtggttggggtcaaaggtcgctctccccatagagggcactggagaaggccacgtagtccagggctccagccggggccccggatcccttgtagggcaccatacggcggatgcagtactcggcctgcttggcagggagctcgcgccgcagctcctcgggggtgatgtagttctggggagaagaggcgttgaggacccacaggtcccgtgccctgccctagcccaccagcccctccaccgcctgggactcaccttgtctcctgccaagatcttgaaggaagctacaacttgctcagtcgtgtcagtctcggctgtctctcgggtcatgaagtctatgaaggcctggaaggtcaccaccccagctgcgttggggtccaccatggtcatgatgcgagcaaactccacttccccctgcagggatagaggccaggcactatgcccatgagcactaaagccaggagggctcccagtgtcccctcctggggactgtccaacctcagctagcagagccccagtaacaagggagttcccttcctccagagaccttagccctggctgtaggaagtcctttatggtaggctgaaatctgcatcctacccacagcaggaagcagatttgctccctggtcctgattttttttccagggccacacccgtttctgtagtgctgtttccctacaggtaaaaatgttgcaagctcagactttgggtccacacagaactgggtccaagtgagttttacctccctgagccttgctagcccctgtgtggatgtagtgaagatgcaggggatggtgtatgtgaagatgggaggtgcacagtaggtgatcagcacagaggagggggtactttgggactcctgggaaggagctggggagctctcaccaggtcatagcccatggagatgaggcaagctcggaagtcatcaggctccatcatcccattccgcttctgtagggggtgagtggttatcaggcttggtctccagcctccaccagcccccaagtgtcttaccccacagggccaggcccctgctgaccctgtcaaagtggttgaaggatgctcggaactcg

SEQ ID NO: 10199 - DNA, 245 bp, Homo sapiens
cttcagtggtggccaggcatggtggctcacacctgtaatcccagcactttgggacggctgtggcgggcagatcacctgaggtcaggagatcgagaccatcctggctaaccccgtgaaaccccgtctctattaaaatacaaaaaaaaattagccgggcgtggtggcatacgcctgtagtcccagctactcaggaggctgaggcaggagaattgcttgaaactggcgggggtggtggaggttgcagt

SEQ ID NO: 10200 - DNA, 12127 bp, Homo sapiens
cgaactctttttttttgttttttttttgagacagagtctcgctctgtcgcccaggctggaatgcagtggtgcaatctcggctcactgcaagctctgcctcgccggttcacaccattctcctgcctcagcctcccgagtagctgggactacaggcgcccgccaccacgcctggctaattttttgtatttttagtagagacggagttttttaccgtgttagccaggatggtctcaatctcctgacctcgtgatccgcccaccttggcctcccaaagtgctgggattacaggtgtgagcatccgcgcgcagcccaaaacccatgttctttacctctgttattctgaatgtagctcatctaagtgaacacacaatccaccaagatataccagaaaataaacagcagcttggaaattaggcttttaaacatttggttggctcacagaatcagttttaaatggcagttcaaaagtcaccttctccaagaagggttcattcttcctttctcctttcccgtaaccattctttatgccactggtccttagtctttagaatgttagaattaaaaaagccttgggggccgggtgcggtggctcacgcctgtaatcccagcactttgggaggccaaggctggtggatcacctaaggtcaagagttcaagaccagcctggccaacatggtgaaaccccgtctctactaaaaaatacaaaaattagccaggcgtggtggctgatccctgtaatcccagctgctcgggagtctgagtctggagaattgcttgaaaccggaaagcggaggctgcaatgagccgggatcgcaccactatactccagcctgggtgacagagtgacactccatctcaaaagaaaaaaagaaaaagccttagaccattgcttcattgtacagataaaggaacaaaggttcagaggctggcctgaccttccagtagcacacagggctggaccagaataaggaatggaactgacatcttgggggagctcaagcactctaccatctgcctggtgggctggacttatccttcccctcatttgactcttttcctagctgcaaccttgagggaatcaccacctctgacttctttcctttgaatccaaggttactctgctcctcgatttctccctcatatcaaatttactaaccaatgtcagtatttgactttctttgtgacaggggatctccagtaacccattctaagagttaatgatgaggcagcatggaataggaactgagggtggaagggtttcaatcttggctcctccacctgctagctgtgtaacctgggtcaagtccctaaacctctgtgtgcctcagtttcctcctctatgaatggtgataataacaatatctatttcagagagttagtataaggattaaatgagtaaatattcattaaggactagcacacaagcactgcagaagtatttaagttaaagaataaataatttggctataatgtctatttaacagaaaaggaaacagaggctcagagattacatgacttggctttactcagtgctcttttcggtacactgctttctaatgcatggtcctgtctgtgctcactgagaaccagattccagtgagaagacttcaaggggtcttggatgctgttggaaatactgttccctcatctccttctgggcctgttatgaagtcgttgtgatgtgagcaaataagagtgaagatgtcagccaggcatggtgcctcatgcctgtaatcccagcactttgaaagtccgaggcaggaggatcacctgagcccaggagtttgaggccagcctgggcaatatggcaagacctcatctctccagaatttaaaaaattagctagacatggtggcacacacatgcagtcccagaaactcaggaggctgaggttgaaggatcacttgagtctgggaagtcaaggctgcagtaagccagcattcatgccactgcactccaacctgggcaacagagcaagaccctatctaaaaaaataaacaaataaatgagagtgaagatgtcatatccaataagcaaactgaatctaaaaatgctgactaaacattaatagttatttcccttttatctcaattaaatgagctagttaagtccctgcatgcacactctcctgtctctttcattgatttcacagtaaagtttatagctatgtaaaattgcattatcatgtatccaccctttgtgcacatgttgggtaggatattttaagggccatctcctttatattcaaagcagctcatactgcttgtggtcactacctgtttgccttgagattggctggaaatttctagagattctttactggttagatcaaggagattcagcagacagagaaggcagagacctctgccatcagcagcccagctcaggatgcccattgttccaggttaatggggttgacctgaggaactccagccacgaagaagccatcacagccctgaggcagaccccccagaaggtgcggctggtggtgtatagagatgaggcacactaccgggatgaggagaacttggagattttccctgtggatctgcagaagaaagctggccggggcctgggcctgagcatcgttgggaaacggtaaagacgtgctgtgggagttgggatctgcctttttcatccagagctctgatgcctgtgaacactgaaagagaaagcctaatgtaaagtagtgatgggatttctaaaaataagatatttatgaaaatttgacaacatgggtcatatttctgagcaaggtcttaccagaaaaattgtcatatcaagatagaactccaagtccaatcaatccagactgatatatttctgtacagagtaagaacaactagcaaggttctttcacttggaattactaagatcggagttttgcagaggttgattaaagcaaccatacccaagaaatagctagcatcaagaatgagatttatccaatgttgggtcaagaacattgcttcgacatggaaattaacatggaacattgcttttcgtgatactgttaatttcatactatgttgaaactagttgagtagacatagttaagagataaacataattcttcacgatagtagttttctattaagaaaaatgtcctgctgggcacagtggcatgtacctgttgtctcagctatgtgggaagatcacttgaggccaggagttcaaggctatagtgtgctatgatcatgcctgtgaatagccactgcacttgagcctcttgggaaacataacaagaccccatctgtaaattaaaaaaaaaaaaaagaaaaggaaaaaagaaagatgtccccaaagtaatagtttgcaccaaaaatgtaggtaggtagatcctagtggccaggctactcttttgaaatatatgttgctgccagatgcagtggctcatgcctgtagtcccagcactttgggaggccgaggtgggtggatcacctgaggtcaggagttcaagaccagcctgaccaatatggtgaaaccccatctctactaaaaaatacaaaaaattagccaggcatagtggcagacgcctgtaatcccagctacttgggagactgaggcaggagaattgcttgaacttgggaggtggaggttgcagtgagctgagatcacgccattgcattccagcctgtgcaacaagagcgaaactccatctcaaaaataaataaataaataaaaagaggtatatgttgcctaggccaggcatagtggctcacgtctataatcccaacactttgggaagctgagttgggaggatcgcttgaggtgaggagttcaatatcagtctggcaacatagcaagacttgtctctaaaaaaattttttaaataaagaaaaatgaagtctatactgcttaacagtcgtttgttccaggataatattactaagtttctcttgcagtgaattggaaaggtaagtaatagcttgaaacaaagcctagcttccatggtttactggcttttaggtatctagtatgtatttatcccaacagggctataggatttccaggtaatatcctaatatggccttaaagtgtatcaaccatcttgttaaggaagaaatcaagttgcttttatgcatgttatgttatatgccctcacagacctctggtgactagcctagtgtctgtccagcaggccaagctgttattaaaataaaaatattagctacaatttttgagtactgattttgggccaagtattgtgctgtcataatttcatttttttttacttcagcaccatagaaccatcactctgaaaatgcattaccaaacaaaaaaagctgagtctcttacatttctaaacaaaaatcagtgcacatctgggtgcagagcaactgacagagccagtgttgaagtttgctttcttgttttgacacatgcgtatacctggtgcggttttatttacagcaatgttttttgcttttagtgaatgtcagtatttcaggttgagtttgtaaggaacatttacattccttagcacaaaaacttgcattgtaaaggatgagatgtatagttctcaaaagtcactattttctttgactaacaattccatcaccaggactttatcttaaagatatacttacaagtattcattgctcattgcaatagttaaagaatggaaataacctgtatgtccatcagtaagctactggtaagtgaaattatgaaacatcatagaatagtatgtagctatttaaaaaatgaggaagctccaagtgctgataaaggcaaattaccaaggtatgaaagaaacaaaaagaaaacaaaactggaagaagaaaggagcatatatgtgtgtgcatcctgtcacacacacacgtattatgcatggaaatattaggttgtgccaatactgcactgctgtatggtattaacagaaatggaagcggagtgtttatttctgacatcgtgaaaggcggagccgcagacctggatgggagattgattcagggagatcagatcttatctgtgaatggggaggacatgagaaatgcctcacaggagacagtggccaccatcctcaaggtgagttgctaggctgctttttacccagctggcacaactgaagtccagtgggaactgttccagtctagcttgattataaaatgggttggattttatactaactctagtttttactagaaatttaatctctgattattttaaatgagccagaatagctttaaaagaaagttctgttatattgactaacagaatgaaagggaacctgctttgggatttcacaagcaagtttttcatacttgtgagaattctaagtatccatcactgttctttaaatgcatttgatgagatgggccctccaggagccacagaattcatcctcctctctctagggctatgcctgttgctttcattacccttttataatttgtggctgcagggagaggctctgttaagatatttcagaatataaatgctactacttttcatttctgttcttttcttgcctttccaagtgtgcacagggacttgtgcagctagagattggaagactccgagctggttcctggacctccgcaaggacgacatcacagaacagtcaggttgtcgatggcttctcatcagactgactcactcttctgcccccactgggagaaagttccccatttaataaatggttgtttggaaataatatctaatgtacagcatattcacagcaccaagtttagtgaactttcatgtgtttgaaataaaaatgaaaggtgggatggaaattcattaatccctagatttttctctcctttattgcttgcaaatgttttcttggaagctcttttctctctattagttctatattgcctatgcacgcatgtacacagctgtgtttatttaaaaaaaaaaaaaggcaacatctggtggcaatttgaccctcattagcacaacattgttctattcattcaattaaatattgctataaagttaacttgtgactagccactcacacatgccgagggcaattaatggcatattcctaggagaaccaagtgtgggggtttttcctgtgggagggagggcttagtgggtgatattttgtgggttagcaaacatcttatatttatttgcaaagctgatgtaagtgccatttttttttagcaaagtatatttcactatatttttttcattgtaatggctgacaaaatcaagatggtagactgtatggttagccccatgtggtacataatgagactatagaaacttatatgtgacccctaagtctcctctctgggttatggataggccgccttagttttgaggttaaaagcatgacttttggtcccctccctggttgccttatttctgaagcctctccaaggcctttgttcagaaggtgctctgatcttacagttagcacacagttacttctggaaagctattagctgcctcctgttcctcactggtgttaaaaaatgagtgaggaaaataccattgttcagataggattacagactagctggcttgtcttagggaatcttcaaagcagtcaaacccaataaacaccatattaagtttgaaacactttttttttttttcatttctggcttacataatgggcagcaaatatctaagacatggtgctgctgtaggattccatgagttaatagttagtgatgatattgaccagacttatatcaacaaacgaaacagttgtctagccaggcttcttccttaatggaagactcatctttgttgaatgatttcattaaagccttattgtatacagaagattagaatgaagctacacagaggaggttccattgaatctcactccaaatggagtttggggaaaagaaggaaaaggcatctcagacagggaaaatagcatacacaaaggcccaaagaggtaacaggtgtttgtgtgatttaagaaaagtttggactgatcgataggtaaggtagtggatagaaatggatttctgtccctcttgagagatgtatgtgagcatcttcttatttatttatttatttatttttgagacggagtcccactctgttgcccaggttggagtgcaatggcgcgatctcagctcactgtaatcttcgcctcccgggttcaagtgagtctcctgcctcagcctctcgagtagctgggactacaggtgcccgccaccacatccggctaatttttgtatttttagtagacacggggtttcaaaacatcttggtcaggctggtctcaaactcctgatctcaggtgatccacccacctcggcctcccaaagtgcctggatgacaggtgtgagcccccgcgcccagccgcatcttcataatttttaagttcacactcaaagacagaactaccaaatttagaagctacatcattaaatatcaaaaaaaaaaaaaacctatcgtctccacttacctggtatatgaatgtgagttgtcatattttggaaacctgggacaaagtatcaaatactttgccctaatcttcttacacagaattttaatttcagagggtaggagtttaattcaatttttaaaaacagtaaatatatcttatcatcaccttgtgcttaaaattatgggtgagatagaagagtttgccctatttggctaattagaagaaggctggtagccgactgtgaaaaggaaatgtcttcccatcatgatgagttgaagactgaccctggtgggcaaaaacaagattccattgccaaacatttttacatccagacccatttaaaaaatcaggatcttgtaggaacacagatttccttctgagcagttacaaaatagggagatcaatgccttcttttgagcgctaaggagaataagctcttgacttaattcatagaaagtgagttcattaagagagaaataacttctagctttggggccaccaagtgtctttttttaaaatgactttcccccaaaccaggaagaaatttccttactccacagaggaaaaaatacttgcgagatcttttcctcagccaactaagggaacacagtcaggcaaagtgtacttttataaacgtcttggggccgggcgtggtggctcacatctgtaatcccagcactgggagttcgaggcgggcagatcacttgagggcaggaattcaagaccagcctggccaaagagcctggtgaaaccctgtctctactaaaaatacaaaaattagctgggcatagtggtgggctcctgtaaccccagctactcaggaggctgaggcaacagaatcacttgaacctgggaggcggaggttgcagtgagctgaaattgcaccactgcactacagcctgggtgacagagggagactcctcaaaaattacaatacaatgcaataaaggtcttggcaaacacacctttctgaaattttttaaaggcaaaagttataatatactgtacttcctcagttctgattagttatctattatagtaccatttacttaaatcatatcctttaaggaaaagtataaaaacactcctttaaatgtatatagccactatgaagtatactgagatctacaacttactttgaaatgaattttttaaaaaaagatgagtgatgaatagataaatggctatgtgataaaggaaatatagcaaaatactcattgtgaaatctaggtgctatttatatggatgtctattgtataattctttcagcttttctatatatttgaaggttttcatattttaggaattaaaatattaaacaactttcatcatagagttaagaaaatggaccaaattataatttatgaactgataacagtgatcttaggcttagcttaaaattttgatgcagaataatttggtagaaaaaaatattcattatttgcaatgttttcgtctacataagaaaggcccttcactatgtatacagtttttgttgaacagccactagccttaaaagactacacagtattaacctcacatattcatttaaatgaataaagggacaggtaatggagatctagcagattggactaaattattactgattctaggaaaatctttgagaaaaaaatgttatatatccctaaaacaagtctttttcccttcagatttggtgcttttttccccacaattgagggttctattttggcaggtttctgctaatcaaggtcttattatacttgttttagcaaaatacataatacattttgggtaataaagttgactgtaaccccaaatgaaacatagtgcccattagctgactatatatacataaacactatgtggcaacctaggaaaatggttttgattttatgtggagcaagaacagctgaaatgattctatggtctccaccttggtgattgaaaccatatacaaaagcacacataatggagaaagcaatggaggaaatgtctaaatgggattgggttgaggtagtaagagaatagtgtgggtgatttttgttttctttcctggcctcctcacgattttctgttagatggttatggtgacatcagtaattggcacactaatggataagtatgcatttagggggtcaagtcagtgtctgcacacaggtgacccctgggtctttctttcagggtagtcagcagagtgcacacagcagctgtcatccctccttcgctcctgtcatcactggcctgcaaaacctggttggcacaaaaagagtttcagatccttcccagaaaaattcaggtattacacggacacacccagagcaaaactatcctgttacccaaattaaaaaaaaaaaatgtgttttttaaaaaccagtcttctttaatataaatgttttttaattttttgagcttggccacataagctgagctttctgaaaggcatgttctgaaggtaggaaagccatagagattccttcagtggtggccaggcatggtggctcacacctgtaatcccagcactttgggacggctgtggcgggcggatcacctgaggtcaggagatcgagaccatcctggctaaccccgtgaaaccccgtctctattaaaatacaaaaaaaaattagccgggcgtggtggcatacgcctgtagtcccagctactcaggaggctgaggcaggagaattgcttgaaactggcgggggtggtggaggttgcagtgagccaagatcgtgccactgcactccagcctgggtgacagagcaagactccgtctccagaaaaaaaaaaagaaattccttcagtggcacaacacaaagcacctgaaaaacagaaaagcagaaagctggagtgcatggtaaaataaaattacttacaaagagaaaattaataaattacaggtcactggagaaaggtcagaagtgtgtataccttctatgggaaaattgggccagttaaaagaaaaaaaaaagtgtgtatatccttgggggcagggtgggacaaggggtccttttaagtcttttgttgaatggagggttatctttgattaaggtagaaaaaaatgtacaatgaaacacaaatgactcagccgggcccggtggctcatgcctgtaatcttagcactttgggaggccaaggcaggcggatcacctgaggtcaggagtttgagagcagcctggccaacatggagaaacctcgcctgtactaaaaatacaaaaattagccgggcatggtggcacatgcctataatcccagctacttgggaggctgaggcaggagaatcgcttgaacccaagaggcagagatggcagtgagctaagatcggaccactgcactccagcctgggcgacagagtgagactccatctaaaaaaaaaaaaaaaaaaaaaaccacacacacacacaaaaatgagtcatcctccaagcatttactcaccatgttccaggcagctgctgctatatagcccatccacttttgtcagaccaaatggttatggccacattgatctcaaacagagagcacttctttaaaatagaggacacagcaggccgggcacggtggctcacgcctgtaatcccaacactttgggaggccgaggcaggtggatcacttgaggtcgagagtttgagaccagcctggccaacatggtgaaaccccgtctctactaaaaatacaaaaattagccgggcgtggtggcaggcacctgtaatcccagctatttggaggcagaggcagaagaattgcttgaatctgggaggcagaggttgcagtgagctgagatggtgccactgcactccagcctgggtgacaaagcgagactctgtgtcaaaaaaaaaaaaaagaggacatggcccctggtgacttggctaccagcttggatgctgaggaagggtacaatacctgcttgctttagtgtcttctcttgaaagacctagaaaatgaaaccatttttcatggggcaatattatatgctaaatatattattttttaatattaaaaagttaattgtgttgcttctttataggcacagatatggaaccaaggactgttgagataaacagggtaagtcagtcattttgctgtatgtatttttctggtttgtgttggatttgcactaaatgtacattttccccaatacagtttattggattgtgagtgtgctctttcaagttactgagataaaaatatggtctaaataacatcaataaatagacttagaaaagtacagtagagcacagagatgacctctatgaattttttggcaaatctcatccactatattctgtgctatgtgtaagttttatttttatttatttattttttcaatcttagtcttttaacctgtacatgtaaagttttataaaacaaaaatggtatcatgtggcacatactaaataagtattttttgagagcatatagtatgatttttatcgatttcatagtactccatcttatgaatgtgctataagtttcttttttttttttttttttttttttttgagacagagtcttgctctgtcacccaggctagagtgcactggtgcgatctcggctcactgcaagctccacctcctgggttcatgccattctcctgcctcagcatcccgagtacctgggactacaggcgcctgccaccacgcccagctaattttttgtatttttagtagagacgggttttcaccgtgttagccaggatggtctcgatctcctgacctcgtgatccacctgccttggcctcccaaagtgctgggattacaggcgtgaggcaccgtgcccggc

SEQ ID NO: 10201 - DNA, 245 bp, Homo sapiens
cttcagtggtggccaggcatggtggctcacacctgtaatcccagcactttgggacggctgtggcgggcggatcacctgaggtcaggagatcgagaccatcctggctaaccccgtgaaaccccgtctctattaaaatacaaaaaaaaattagccgggcgtggtggcatacgcctgtagtcccagctactcaggaggctgaggcaggagaattgcttgaaactggcgggggtggtggaggttgcagt

SEQ ID NO: 10202 - DNA, 112 bp, Homo sapiens
tttttttgagaaggagtttcactcttgtcgcccaggctggagtgcaatggtgcgatctcggttcactgcaaactccacctcccaggttcaagcgattctcctgcctcagcct

SEQ ID NO: 10203 - DNA, 604 bp, Homo sapiens
ctaatcaaggtcttattatacttgttttagcaaaatacataatacattttgggtaataaagttgactgtaaccccaaatgaaacatagtgcccattagctgactatatatacataaacactatgtggcaacctaggaaaatggttttgattttatgtggagcaagaacagctgaaatgattctatggtctccaccttggtgattgaaaccatatacaaaagcacacataatggagaaagcaatggaggaaatgtctaaatgggattgggttgaggtagtaagagaatagtgtgggtgatttttgttttctttcctggcctcctcacgattttctgttagatggttatggtgacatcagtaattggcacactaatggataagtatgcatttagggggtcaagtcagtgtctgcacacaggtgacccctgggtctttctttcagggtagtcagcagagtgcacacagcagctgtcatccctccttcgctcctgtcatcactggcctgcaaaacctggttggcacaaaaagagtttcagatccttcccagaaaaattcaggtattacacggacacacccagagcaaaactatcctgttacccaaatt

SEQ ID NO: 10204 - DNA, 13862 bp, Homo sapiens; identical to SEQ ID NO: 5477

SEQ ID NO: 10205 - DNA, 14040 bp, Homo sapiens; identical to SEQ ID NO: 5478

SEQ ID NO: 10206 - DNA, 2232 bp, Homo sapiens; identical to SEQ ID NO: 5479

SEQ ID NO: 10207 - DNA, 7374 bp, Homo sapiens
cagggtcataccctaatcaagcttgctacaaagatcataccaactgctgttaccatggagcacatctcagagaaggtgtctccgtcaggaaacatctccagtgcacccaaggaattttctgtctatgtaagaagctatctaaatttgtcattcagattggcctgatagaaggtggttggctaggaattaggggctgtcctctgaactaggacagataactagttgtgtcacttatttcctggacttctgctttctcacctacaaagagagagagttggaccaaatgatttatattattatttttacttttatcaaagttatacatgtataagtaaaaatcaaatatttccataaagtttgtaaagaaacagtaattccttgtcccacttctccacatctccaattctcattatcccaaagcttctacttgcaacaattttagatgtttatttgggtacttgcctccatgttggcttttgccattatttcctgatttttcagttttgattatgacatcctctcattgaaaatgaagattaactcttttccatggcacttccatcttcccaaaatatttatgtcttaatttaaaaaacaaaacaggtttctggagatgtaattcccataacaattaattcacccatttaaagtacacccttcagtggcttttagtgtattcacagagttgtgtatccatcaccataatcaattttagaacatttttcttaccctaaaaagaaaccccataccccttagccgtcacctcctattcccctagtgtactcctccagcccctggcaaccactggtctactttgtctcaataaatttacctattctatacatttcatataaattgaatcatttataatgtgtgatcttttgtgaatggcttctttaactttgcatactgttttcaaggttcatttatgatgtagtatgtctcaatatttcatttattttttattgctgaataacatttcattgtatggatatatgacattttatttatctattcatcagttgatggacatttgaattattttcatttttttggtcattatgtataatgcttcaacaaacattcatgtacaagtttttgtgtggacatgagtttttgttttccttgggtgtatacctaagactggaattcctagatagcatggtaaatgtaggtttaacatttgaggcactgctagaagactgtattatctttttgttcaagcaatactcaatgttttcacagtgactatgtgaacaaaacagctctcagttgagctatttagtgtacttaaatactactttcttccatttttttaaatgtttctgagtgtaataattgctttacattttttttttcttgagacagggtctcagctctgttgcccaggttggagaacaatcacagctcactgcaacttcaaactcgtgggattgttttttaaattttttagtagagataagggtcttattatgttgcccaggctggtctcaaactccagggctcaggatcctcccgccttggcctcccacagtgctgggattacagacgtgagccactggtgcccagcctatttttctttaatttgcttagttttctgcattcctattactaaaactttcccaaattcttcttcagaagtacaaatattcccccattatgttgattcacatcagataacttataaatttcttcctttctttattccttccttcactttcttttcatttattttcttttttttttcccaagatatccctctggcgccctcagcattttgctccagccttgttaggtaggcctgatgcacaactgttgtcgtgggatttcactcatgcatcctgaggattcaacttactgtctaatttattatttttaaaaagtgtttcttctttcccttttctgctttttgttccaccttctggaagatcatatcaattcacattttaacccctctacggaaattttcattcctgctgtcatgattatactttctgagacttcttgtttctatacatattcccttttttagagcctatatttttttcttttatgaaggcagtaccttctcttatgcttctgaatatattaactgtaggcttgtctcattttcttctgctcgcttccgggtctggatttcctagccccacttttcccccttgcgggtagcgtctctctgtttcctgtacaacacttttctcccatgtctgtgatgcttgtcacatgaattgctaggcggtgcaaagccggcaggaagctttgcgcgcacggtggggctcatccgtcgtgagtttgcagcgggaatcatctggtcgggccatttcgtcgggagtcacaagtgtgctatcaggagagctgaccctgagaggactcctgcagtgcacaggaggtgccagcctggcccaccacaccatgagctgctggggagaggagggccgcggggtcaccactttgtgcagaggccatgctcttgtgggcggttctggggcggcgccggcagtggtcttagagatgggaggaagaagagagccctctgctgggccaggcggggctggaggggcgtggaggcgttgtaactgctttttgaaatgactgttagctaagccgcagatttgggctcctttcccccacactccccctcacgctttcacccacacgctccccacatggacaccctcctccggccttcctgggaacctgccgcttaagtcctgcgctgctgggtccacgtacagcccgagtagtttgtgttctttctctccaggcgccatttggccatcttcactttttggtttttctgtttgtttgttttggggtttgttttgttttgttttgttttgttttttggttttactgtctactcccacttttgccttatataggtttatgccttcaattatgatcttcccatctggaggagggccctgggttaaacagcctgccttatatgtcacccaaatgcctctacattccatatctggagtttcaaaacaaagggctgctgtcctttcatagaagcccacaccacctgcaagtggtgtctctgaaaagttgagtttgagcagctaagttccatctcagaaaggtgaacacgttcattatttagacaaattatgggtgaatcccaaaggcaggaatcctttagtaataaaaactgcttctcatcattttcttctacattaaagaatttatgaaccaagtaaaattaaaacaaggtgataaaaggactgggcgcagtatctgctcctgtgatcccagctccttaaaaggctaaagcaggaggatcactggagcccaggaattcgaggccagcctgggcagcatggccagaccccgtttttttggtttgttttgttttgttgtttatttgttttttattttaacttttattttaggttcagaggtatatgtgcaggtttgttatacaggcggtaagtagtaatacccaacaggtatttctctgctcctctccctcctcccaccccccaccctcaagtagatctcagtgtctgttgctccgctttgtgttcatgtgttctcattatttagctcccacttacaagtgagaacatagagtatttgtttttctgttcctgtgttagtttgctgtggataacggcctccagctccatccatgtccctgcaaaggacacgatcttgttcttttttatggctgcatagtattccatcagatcctgtttcttaaaaaaacccaacaaggtgataaaggaggtagaaataaaactagcactcctgtcttaagctaaagagaatatatgaggcttgagtcatgtgtacatatgaaggggtggcctgcccctccccacctgtgggcgtttctcgtcaggtggaacgagagacttgagaaaagaaagagacaaagagacaaagtatagagaaagaagagtgggcccaggggaccagcgctcagcatacggaggacccgcgccggcaccagtctctgagttcccttagtatttattgatcattatggggtgtttctcggagaggggggatgtggcaggacaatagggtaatagtggagagagggtcagcaggaaaacatgtgaacaaatgtctctgcatcataaggtaaagaaaaaagtgctgtgcttttgatgtgcatatacataaacatctcaatgccttaaagagcaatattgctgccagcatgtcttacctccagccctaaggcggttttctcctatctcaggagatgggatattcaatcgggttttacaccgagacattccattgcccagggacgagcaggagacagatgccttcctctgatctcagctgcaaagaggccttcctcttttactgatcctcctcagcacagaccctttacgggtgtcgggctgggggatggtcaggtctttcccttcccgtgaggccatatttcagactatcacatggggagaaaccttggacaatacctggctttcctagacagaggtccctgcggccttccgcagtgttttgtgtccctgggtacttgagagtagggagtggtgatgacttaacaagcatgctgccttcaagcatttgtttgacaaagcacatcctgcacagcccttaatccatttaaccttgagttgacacagcacatgtttcagccagcacagggttggggtagggttacaaattaacagcatctcaaggtagaagaatttttcttagtacagaacaaaatggagtctcttatgcctacttctttctacgtagagacagtaacagtctgatctctcttttccccacatacatatataattgtgagtacattatgtaaccatgatgtatccaactcttttaataaaaatgttatagtttgatattaatatttttattataaaatgatttaatgaatgtactgtttattttgctgtgttacaatttaaggaacctaacaataaacttcagattcacaaaataaattagtttgcaccagtgcgttatcctctcacaaatcttcaatttgaagggtagagaagaacaaaaagcacaagagaaattgcatacaaagaaaaaaatcagtgtttttgtcagtcaacgggagcttacttttcagaggaaattatttgtgtgatcaaaatctggcaatgggcttatgtttatctcattttggtaaacatcagttcagtatggcgacgcatttttattttattcaaagtatgcttattgcaaatatagttatcaggtcaaagttaatgttgggatttgctctatatgtatgtatctgtcttccatctatcagctgtttgtcaatcatctatcttctaactatctatctatggatctatctatctagctctctatctatctatctatctgtctgtgtgtccatccatcttctatccttttagtcagtcccgtgatcagccttgggcctcattgaccccttgttaaatatcctctgggtgtataggttagtactggcatgatcacagcactgtgcccctggtggacacacagagatatttggtgaattgttggttctttttgaaaacacaactgcatccattcattacaatctctatatctgttgctttctttatagggcatcacaaaaaaatgtgaaggagaagaaattttcctaggtcagtttatatataacaaaacaggaaccaccgttcaaacatttgaactccaggtaatgtatgctctgggaaatgatatgagtagctctatcactgggagaaatttgttgggattgcttcatgtaaagtgacgtatgagaataattatgacaaaagcgtgagttacacaaggcttatctgatcttcaattctgagctcgaagtgcttacgaggattttaatgcaaaagacagacaaatgcaaaagcagtttctaagtcaaattcttcctcatctgctatcacttttttataatatatatatttaatttcttggttctttcttaactattccattccctgaatactattaagtgtaatagttactacctcaccttgcttgagtataggggaggaagatgatggtacaatatgaagtggacagaggcagagagaagctcaaaggaatagaggataaagatttaatatcagataatacaagtaaaactcctaacccagtgggagaaaatatcaactgttagcttataaatcccctgaaactcaccaaggcaaatgaaatatatcctcattttttaaattagccacagggagtaactgaagagatgtagaagacattttatatcatgtaaaaacaagtgttttatgacactttttggccaaatagtgagaaaataaaggtaaaacaatacatatatgttagaaatgagcatatttgtagagcttcatatttgattatgtattcatatgcatttgggctcatattatctgttcttatagttggcttcatagttctggtttttagacaacaagccctcttgcccctgctcctcggcacagccagcaaggagtgtagaggggggaaacagcggaatagagaggtcacttggccgccatattatcctcctctccctctacttatcttttcataagctctttattccagtagcttattttctcattcattagactgatatttgaaaatagttatgttagaaaagaaaaagtatataggccaggcgtggtggcttacacctgtaatcccatcacttttggaggcctaggcaggtaaatcatttgagccctggagttcaagaccagcctgggcaacatggcaaaaccctgtctctacaaaaaattaataaattagctaggtgcggtgcgtgtgcctgtagttccagctactcgggggtctgagctgggaggatgacttgagcccaggaggtagaggtggcaatgagccatgatcatgccactgcattccagcctgtgtgacagagccagatcctatctcgaaaaaaaaaaagtatataatttaaaattatatcagtattcattgggattctttgagatgaatttcgttataaggcattgattttcttttctttattttcagcatgcagtttctgaatatttattatgtgtgaaacttaatatctttagcaactggggacacccgaagtatacttgtttatatcgattcagggtccatggcacaccaggcaagcacatctagaagagttggtacagaaggccatgccacatgtccagaatattcaagaatgcttattctcttagatgataccgcacccataggaattgagaattgggagtgggaagaaaacctcaaagtggttcatacttgcctgtaaaaagtaaatgcattttactaataaaaaaatatggaagtaaattaaatatccttgccatagtttagtctttaaggatgcttcatgttgttagagcattgaaaactcattttgtatttagaagaagatag

SEQ ID NO: 10208 - DNA, 923 bp, Homo sapiens
gatgacagcttcatgtgtgttactgcccctgaagaagaccttccagtgggacaaaatgtggaggtggaagacaatgatcattgatgatcctgaccctgtgtaggccgaggctaatgtgtgtttgggtcttagctttcaacaaaaaaagtttaaaaagtaaataaaaaatttttaaaatagaaaaaggcctatagaatagggatataaagaagaaaatatttttgtacagctgtacaattttttgtgttttaagctgtgttattacaaaagagccaaaaagttataaaattgaaaatacagttaaagtaagctgtttattattgaagaaagaaaaacattttaaaataaatttagtgttgcctgagtatccagtgttgataaagtctacagtagtgtacagtaacatcctagggccttcacatttcactcaccgctcactcactgactcagccagagcaactttcagtactgaaagccccattcgtggtaagtgccctatacatgtgtaccatttttaatcttttttatacagtatttttactgtatcttttctctttttagatgtttaaatacacaaataccgttgtgttacagttgcctacagtattgagtacagtaacaatgatgtacaggtttgtagcctaggagcatagactataccatctaggtttgtgtgagtatactctgtgatgttcacacagtgaagtcacctaacaatgcatttctcaaaatatgtccctgtcattaagtgatccatgaccgcagttgggagaagtttcctctgttttctgaaggagtttatatatacgtgtatatttttcaaatgtttaataaaatttaccagtgaatccagggctggattttatttgtgggaaaggtttttattgtgaatttgatttaactagagctgttcaaattctcta

SEQ ID NO: 10209 - DNA, 923 bp, Homo sapiens; identical to SEQ ID NO: 10208

SEQ ID NO: 10210 - DNA, 923 bp, Homo sapiens; identical to SEQ ID NO: 10208

SEQ ID NO: 10211 - DNA, 2651 bp, Homo sapiens
tgacattgtgccactgcatttcagcctgggtgacagagtgagactctgtctcaaaaacaaaacaaacagaaacaagaactctatgttgagaaatccatactagagggtttaatttctcactttgtgtgctagtgattaataaatttcaagcttatcacacagccagaaatgtcgcctgtgtttctacaataaaagatttgggaatattgtgacattttttcactgagccttctgggttcattattaagatataacaattttagaagacttattgagataggtatactttttaaaatttggattcaatatatcaagctcagcattttgtcttttttttgttttgttttaaacaactttgggtttacttgtaagagtatttcagtggaggaaaagtatcagaagtttagcactgagtgcctgcctaactattttatgtcttctttcatgatgatgcttaatctcaacataatgactcagtttaccattgtaaactctttgtaggatgtcactgattttatcagtcatttgttcatgcagctgggaactgtggggatatatgatttgccacatctgaggaacaaactgggtgagctccattgaaaaatttctaactttcttattaaaagcaagcttcctcacttcctgatggcttatgcaaattaatgcctatttattcatcagagggtgactggagagattatggttttcttatgaatttcttgcttgagcctgcttgtctgctgtttctaagttgtctgcactattttatgtgagtaattttctactttattatgttctgttttcacatgtcaaatcagctctcccaagaatgctacttgtaacctaagtagacgtgaaccgaaaagggtaaagacccagctaaaaaaaaggttgactcaagttcagttcacattcgtaaagtagttaggctgccttaggttgcttattcttttcttgaaaagaatccctcaagagagaaacatgtgaggccacagcagcttagatctgtcttccacagagaaggtggcttttacagagaaattgacatactcatcacttatctgacatgacccagctttgtaaaactggcttctattaaaatagtcttaatagactattcactgaggaggagagaatcttattcactctttacattctcttcacattttcagaatagatgtttaaatcattgctcacactggatccataaatgtctaaaatgttgatgaagaaataggtgattagagagtaaaattaatagagacttacccttccttgcattttaacataatattctttccccttttccttcctctgttacttggctcttaaataccagaagtgagatatgaaaaagggaactgggaacaagtattgaaagcaccataggtttatcttatattagcattttccaaactttataatgaaccagcagtgacccacacatctgccaggtaggaattgctcatcagttgtgtcgcgttatcttgttaagcttcagcaatgttccatacagccactaataacagatcaaagtgagcattagggttgaaattagtaagctgtttcttctcagttctttctggtagttgaataaatatagaatgtattaaatagttttctttatttcagaacttctcagagtctgtaatatattgtatggtggtagcttaggaggaagatgcaataggaaacttttcccagataggttcactattttttttttccacgaaaaataagctgttctcaaaatacagtttacaaaattttatccttaactcttcactctttctcctagttagggagaccgctccaccagtagaaaagataaaccctggtaatttgttgtgtaaatgggataaatagcctagtacctagtcatgtggattcaggcagcactgagcctaaattaaagtttgcaaggtatacatgttaatgtatctaagttactatatttagcctgtttcttaagtatgtttcagaaacatattcgtttttttcagtggcagttaccttcagatgcatgtgcttctaaagcatgttggttgcatgtgcagtacatgttgcttaagcatttagcttcagaatggcatctttcctgtgaatgtcttaacatttacaaaaatataccaggatctcaaatatcagtgctggtatttttttttttttttacttaaagaaactgatatgattaatttttaagagacaatatgatcctgtgtgggctgtgtaaccctagtttttattgtcttgtagttattaaatagagcatctgttgagggactcttttaaaaccacagccatgaacagacgttggggctaagagacagagcagcctgcgacagtgtggacctacctgtagcagctagcaaaggcctctagcagctacagtcccttctggagtctttatttgcatgcaaaatgcaaaggagtcctggtgacctacctccaaggcagctgccctcctgaacactcccttggaaaacagtaaacatcattttggaatgtgaacaaccagagactacacaggagaaaggaaaaaaaaattctgaagatgcaaatctgggtggcttcaccgttcagttttttaataaaaggaacaatatacaacacgttgttctttttctcttttgaaatcccttctattacag

SEQ ID NO: 10212 - DNA, 2653 bp, Homo sapiens
tgacattgtgccactgcatttcagcctgggtgacagagtgagactctgtctcaaaaacaaaacaaacagaaacaagaactctatgttgagaaatccatactagagggtttaatttctcactttgtgtgctagtgattaataaatttcaagcttatcacacagccagaaatgtcacctgtgtttctacaataaaagatttgggaatattgtgacattttttcactgagccttctgggttcattattaagatataacaattttagaagacttattgagataggtatactttttaaaatttggattcaatatatcaagctcagcattttgtcttttttttgttttgttttaaacaactttgggtttacttgtaagagtatttcagtggaggaaaagtatcagaagtttagcactgagtgcctgcctaactattttatgtcttctttcatgatgatgcttaatctcaacataatgactcagtttaccattgtaaactctttgtaggatgtcactgattttatcagtcatttgttcatgcagctgggaactgtggggatatatgatttgccacatctgaggaacaaactgggtgagctccattgaaaaatttctaactttcttattaaaagcaagcttcctcacttcctgatggcttatgcaaattaatgcctatttattcatcagagggtgactggagagattatggttttcttatgaatttcttgcttgagcctgcttgtctgctgtttctaagttgtctgcactattttatgtgagtaattttctactttattatgttctgttttcacatgtcaaatcagctctcccaagaatgctacttgtaacctaagtagacgtgaaccgaaaagggtaaagacccagctaaaaaaaaggttgactcaagttcagttcacattcgtaaagtagttaggctgccttaggttgcttattcttttcttgaaaagaatccctcaagagagaaacatgtgaggccacagcagcttagatctgtcttccacagagaaggtggcttttacagagaaattgacatactcatcacttatctgacatgacccagctttgtaaaactggcttctattaaaatagtcttaatagactattcactgaggaagagagaatcttattcactctttacattctcttcacattttcagaatagatgtttaaatcattgctcacactggatccataaatgtctaaaatgttgatgaagaaataggtgattagagagtaaaattaatagagacttacccttccttgcattttaacataatattctttccccttttccttcctctgttacttggctcttaaataccagaagtgagatatgaaaaagggaactggggacaagtattgaaagcaccataggtttatcttatattagcattttccaaactttataatgaaccagcagtgacccacacatctgccaggtaggaattgctcatcagttgtgtcgcgttatcttgttaagcttcagcaatgttccatacagccactaataacagatcaaagtgagcattagggttgaaattagtaagctgtttcttctcagttctttctggtagttgaataaatatagaatgtattaaatagttttctttatttcagaacttctcagagtctgtaatatattgtatggtgatagcttaggaggaagatgcaataggaaacttttcccagataggttcactattttttttttccacgaaaaataagctgttctcaaaatacagtttacaaaattttatccttaactcttcactctttctcctagttagggagaccgctccaccagtagaaaagataaaccctggtaatttgttgtgtaaatgggataaatagcctagtacctagtcatgtggattcaggcagcactgagcctaaattaaagtttgcaaggtatacatgttaatgtatctaagttactatatttagcctgtttcttaagtatgtttcagagtcatattcgtttttttcagtggcagttaccttcagatgcatgtgcttctaaagcatgttggttgcatgtgcagtacatgttgcttaagcatttagcttcagaatggcatctttcctgtgaatgtcttaacatttacaaaaaagtaccaggatctcaaatatcagtgctggtatttttttttttttttttacttaaagaaattgatatgattaaatattaagagacaatatgatccttgttggcttgtaaccctagtttttattgtcttgtagttattaaatagagcatctgttgagggactcttttaaaaccacagccatgaacagacgttggggctaagagacagagcagcctgcgacagtgtggacctacctgtagcagctagcaaaggcctctagcagctacagtcccttctggagtctttatttgcatgcaaaatgcaaaggagtcctggtgacctacctccaaggcagctgccctcctgaacactcccttggaaaacagtaaacatcattttggaatgtgaacaaccagagactacacaggagaaaggaaaaaaaaattctgaagatgcaaaatcttgggtggcttcaccgttcagttttttaataaaaggaacaatatacaacacgttgttctttttctcttttgaaatcccttctattacag

SEQ ID NO: 10213 - DNA, 32205 bp, Homo sapiens
tatgtcagactgctatagtatacttctacagattatagacctccagtacctctggccagaaagatggtatcgtaaacaccctattttttttcttttcttttttcattaggtacaagctttgtgctaagaagttgacatactataagctacaaaagttctgtaaagtagatataactagtttcattttatagatagagaaaattaatctcttacagtgctaagctcacagagtttctaactgtaaaatgctagaacttgtctttcaagcctaaagacttccttggggctaaatagtgaaaaaagccatttcacaaataagtaaatggtatttagaggcatatttggatttcctggtaaattccagtctgtgagcatcatgaatattagtttaatgttgcatgggctcatgttgaagttttaagagaagaactgccttgaagcttaggtttccttagctattaggctactgactttcttgcctaaaccagggttttttcattgaagaccaaaacttaccttctccttcagtttgtagtttggaaattggtagaagagctttgtaaacttcaaattaagtacaaactaagtgtcatagtcaaatttactaatcttaattacagtattgttcaactgattgctatcttctagctctttcctgccgaataatggtcttgtttcctgctctgttggtttagagctgacttctttcagctttggtaagcctgaaattatggggttatgtttaattcatattgtctgggtggactttcctctcttgcatttctgcttgaatagaagaatttttctctagagagtagtttgtcatccttactctgttgattcagatgactctttgtatgatctgagaggtatactgttctgctattctgagaagaagtatttcagaaagatgaattaagagtacagtggactgctcccacctggaaacttttatctatctcacctctggacctgataaattctttatcactcaggaccttgatgacgctgctctctgaaaccctccccagctctctctattaccgtgagaaacatcagaactttggttcccattgcatatcgcaggtacctctgctttcatgccatgctgtaatggagtgattgggtagcatgttttcatctctttccagattgaaaatctgtatttctccctgtatatcttcaacacctaatgcacatagaactttgtaggtacctggaaaatgcaccacagttttcttttctttttgcagacttttcacaagtattaccaacttacaaagaattaattttgtaggattctagaaagacaaatcaggaatggtgccatatacatcttttttgattccctgctctaaagaatattatcaggttaccttcctgcagagttttaaaagaattgcatatttcaagctgactttcaggatgtaaatataaccaaagcaactgatatgtaaaaaatatattcaatggcattcctagattttcttctagggtgttttattgttttgggttttacatttaagtctttaatccatcttgagttaatttttgtataggtataagaaaggggtccagttttaattttctgcgtatggctagccagttctcccagcaccatttattaaatagggaatcctttccctattgtttgtttttgtacggtttgtcaaagattagatggttgtagatgtgtggtcttatttctgagatcttcattctcttccactggtctatgtgtctgtttttgtaccatgcttttttggttactgtagccttgtagtatagtatgaaagatagcatgatgcctccaggtttgttctttttgcttaggattgtcttggctatacgagcttttttttggttctatatgaattttaaaatagtttcttctaattgtgtgaagaatgttaatggtagtttaatgggaatagcattgaatctgtgaattgctttgggcagtatggccattttcatgatattgattcttcctatccatgagcatgtaacgtttttcccttcgtttgtgtcctctctcatttccttgagtagtggtttgtagttctccttgaagagatccttcacttcttctgtattcctagatattttattctctctgtagctattgggaatgggagttcattcatgattttgctctctgcttgccttttgttggtgtatagggatcctggtgacttctgcacattgattttgtatcctgagactttaccgaagttgcttatcagcttaagaagcttttgggctgagatgatggggttttctagatataggatcatgttatcttcaaacaaagacaatttgacttcctctcttcctatttgagtacgctttatttctttctcttgcctgattgccctggccagaactcccaatactatattgaataagaatggtgagagagggcatccttgtcttgtgccagttttcacggggaatgcttccagcttttgcccattcagtatgatattatctgtgggtttctcataaaaagctcttattatttgagatacgttccttcaatacctagtttattgagagtttttaacatgaagcgatgttgaattgtatcgaaggccttttctgtgtctattgagataatcatgtggtttttgtctttagttctgtttatgtgatgaatgacgtttattgatttgcatatgttgaaccggccttgcatcctggggatgaagccaacttgactgtggtagataagcttttggatgtgctgctggatttggtttatcagtatttcattgagattttttgcgtcgaagttcatcagggatattggactgaagttttctttttgttgtcgtatctctgccaggttttggtatcaggatgatgctggcctcataaaatgagttagggaggagtccctccttttcaattgtttggaatagtttcagaagaaagggtatcagctcctctttgtacctctggtagaattcaactgtaaatccatctggtcctggactttttttcattagtaggctatttattactgcctcactttcataacttgttattgatctattcagggatccaacttcttcctgattcagtcttgggagtgtgtatgcatccaggaatttatccatttcttctagattttctagtttctttgcatagaggtgtttgtagtatttgctgttggttgtttgtacttctgtgagatcagtggtggtatcctgtttatcattttttattgtgtctgtttgattcttctcttatttttgacaaagctgacaaaaagaagcaatagggaaaggactctctattcaattaatcctactgtatatctggctagccatatgcagaaaattgaaactgttcctgtttcttaatccatatacgaaaatcaacttacgatggattaaagacttaaatgtaaaacccaaaattataaaaccctggaatagaatataggcaatatcattctggacataggaatgggcaaagattttatgagaaagacaccaaaagcaattacaacaaaagcaaaaattggcaaatgagatctaattaaactaaagagctctgcacagcaaaagaaactactgtcagagtgaacaggcaaccaacagaatgggagaaaattttttcaatctatccatatgacaaaggtctaacatccagaatctacaaggaacttaacaaatttacaagaaaaaaggagccccattaaaaagttggcaaagaacatgaacagacacttcccagaagatattcatgtggccaataaacatgaagaaaagctcaacatcactgaccattagagacgtgcatatcaaaatcacaatgagataccatctcatgtcacaatggtgattattaaaaagtcaaacaacatgctagtgaggttgtagagaaataagaacgcttttacactgttggtgggaatgtcaactaattcaaccactgtggaagacagtgtggtgattcctcaaggatttagaaccagaaatatcattactgcatatagacccaaaggaatagaaatcattctattacaaagatacatgcacatgtatgtttattacagcactattcacaatagcaaagacatggaatcaacccaaatgctcatcagtgatagactggaaaaagagaatgtggaacataaacaccatggaatactatgcagcaataaaaaggaatgagatcctgtccttttcagggacatggatggagttggaagctgttatcctcagcaaactaatgcaggaacagaaaaccaaccaccacatgttctcacttataagtgggagctgaacaatagaacacatgggcacagggaggggaataacacacactggggccagtcagggggtggggggtcaagctgagggagagcattagaaaaaatagctaatgcattctgggcttaacccatttatgcctagtgttccatttctggaatgctaagcatgtggaagttctttatatcctgctcaaggtcattgccaaggtctgatttttcacattcaacaaattgcaacctctggcataaatgggttaatacctaggtgatgagttgataggtgcaggaaaccaccatggcacatgtttatctatgtaagaaacctgcacatcctacacatgtaccctggaacttaaaaaatttaaaatatatatgtatatatatttaatatggaattttaaaaattactaatgagttcttttatctgagtaattttgcatcaacatgcttttattatggaagagaagattcagtgagtacaaaattgcagatacatgtgtcagaagatccctgaatataataaggcttagtattctgtgtcataattgcctgtttgtattcctctctggtctttaaacttcattagggcaaggatcaactccatcttactaaccatttgattccctatgtattacacgatatatgaccaataataagccttcaataaatacttgtaaaataaagaatgttatgtaatatatcatgtggtattgttttattgatgtgttctttgaagtgttacctttgtgtccttagaggctatggtgggccctcaggccatatatgttggatgatttagtggaaaagagattagacttttatattttattctatttatttatttatgttttaatcttgtgtaagcctatagaggccaagatagggctcagagttaaaaacagtgatgttctaactttcaaaactactaaaaacaaaattagctatcaagggaaatcctgagtgttctgactgcaggggttccccaaagcctggaggaccgaagctttgaaatgctgcatggtgtgcctcacctctgttgagtatagtgaggaacatgagctgaggagtggattagatgaactcttaagatttttttccaactttacggtttgagtttatgagtaagtaagtgaggaatgagcccagggactttgactactttgctgtgcagtaaattgctgttttcttagctaattctggagtgtgtattttggttttaatgtaatgtcctttcagcactggaaataaacagatttatgaccctccattttcacatgtaaacttccagttccttcagtaaaatgctggaagttgcttggctgtaaccactgtaactatttcctggcagttttgcattttattacaattcgactttttaaatgcatggttcagtccagttaataggcagaaaactatagctattccttggaactgacatagggaagttggtttctttctgaggaaagatgtgacactctgatggatttggcaaaataccaattcagtaaaatttgcctggttcctttctgacagcaaatggaggtaattgtacgtatatagatttctacagtaaacaaagggcaaaaatggaaacattttttgttttttaatgttgctggaatataatatttccatatttggttaatcatcaaatcattcaactccatgcaaagtactcttttcaaaattacaaatcatcttgatggattagacttggatgtctaaattttttattatgtattctaaattatctataggtacattttgaaaattatatatacatgtatcactgtactacatttgttataaaatgtgaaatattaagcgattaaatactttattaatgtcataaaattgtgccctacccaaaatatattttaagaagatatcatttgaaaataatgtaaaatattcttcattattatgattttgttgccaaaagtaatgttagagtccctgttactgataattttcatgactgtaaattttcaacatttggaaacaaaattttctgatgtgttttaaaatcttaaagaatttcagtagattttgacacatttttgttaaaagtatgaaagtgtcacagctttagaaggatttagaataattatcaattggtattagggatgacaattttaatagacaaattttaactgaaacatttgctttattgatgtctaggactaaaaaaaatattatagtgatggaaccatttcaaaacatctgtttttaaaaacttctgtcaacatgtttgacagaagtcagaatagggtaattataaaaaaactgccattttcttatgtttgcatcattagtatttgcaaatccttgtttctttgcaagtatattttaaactacttgttcattttatgagtgttagcctgattaattcagataagatgctcaagtcagtttaagcaggcagatgtgaaaaagggaatatgctgtgccttaactatcttatagggacttactagcacactgtacataacagatgaacatctgatattagatctgatgggcacaccaatgttgtttcatatattaaataatagtggaagttttcaatttaattagtttatttatttatttatttatttttgagccggtgtttccctctttttgccaaggctggggtgcaatggcacatggttgcagctcactgcaatctccacctcccaggttcaaaggattcttctgcctcatcctcccaagtagctgggattacaggcgtgtgccactatgccaggctaatttttgtattattagtagagacaaggtttcaccatgttggtgaggctgctctcaaaatcccgacttcaggtgatccacccgcctcagcctcctaaagtgttgggattacaggcatgagccactgcgcctggccaattgtatttttatgttagaaatatatatgggagttacaatactttgtttccaatgttccgctggaaaccactggttgaaaggataggtcccagtgtcagctgcccagttggcagttttggatagaatataagttctatgaaggcatggatgaagtatccttcatggtaatgatggtaatgttagtatagtcacttgtttaatgttgtataactttttaactcttccaacttcaatttcatctatatctttcatagcagtccagtaaagtagtatcaattatagatatcattcctactttcagataaagtaactgaggctcactagttttgacttgctcaaggttacgtaaatgataagtgacagactggatttaaagggcggagtccactttactaaactgcctctgtcttctagccaagtttgttatgtaaagtaagtattcagacattggctaagtatattattaatcaagaaaacagtagaacaggtttaaggaatttttttttccctctcctcagtgtcaaaaagcagtcaagtaaaagatccaagataaataacttcagttcccaaaaataacttcaattccaaaatttccctatgactaggtatatctaattggatagctgataaaatgagtgggaaattgaagaagggatattttgagaatgtgtggcaacttaatggtaatattgaagaagcaaatggatagttattgaatcataatagttttttaaacttaaatactagggcttgatcttcatattttaggaaattatctatttgttgcagtagaaattagcataaatgaatggaaacttaaattatctcatctgtgcaaggcagtcttcagagactgatgtttatataagtgaaaactcagaaaaattttttggctgcatttcaagctggatagcggggtcaaaacttcaacttcttaattggtgatacaacgtcagaaatcacaaaagaagtatttcacaggaaaaaatgacataccccgaaaacattcaaatcaagaaaatcacaggggtacagtggatggtcccccttaaggtactgcgtacttggcttccccgctggtaaatgcctctcttttactaagttgttgtcgtgcagagtggcattgcagctctgtacttttacagaataatttcaggttctaaaattgatacattatttcagattgtaagaatagtataaaataaaattttaaaagggaaaataattccatcaatttaatggaatgtgtagggtttaagttataacaacaaaaacaaagttgtagttttttaggattactcatataaatagtgtgtctattaagaattactggctttatgaatattaaataagaaggctggccgtggtggatcatgcctgtaatcccagcactttgggaggccgaggcagacggatcacctgaggtcaggagttcaagaccagcctggccaacatggcgaaaccctgtctctactaaaaatacaaaaattagccgggcgtggtgacgcatgcctgtaatcccagctactcaggcggctgaggcaggagaattgcttgaacccggaagacggaggttgcagtgagctgagatcgcgccactgcactccagcctgggtgacagaacaagactccatcttgaaaaaaaaaaaaaattaagacaaccacagatataaggatttgcaattagaaagcttgaagggaaatttttggaacttctaggtcaacctaaaattacaaatagggaagcagctttggagaggaacatttgcacttctgaagtaatactgtgatttggactgtcagacattgtgatatattggcatcaccacacctctgttaattataaacttacctattctcagtgccttgttaactgttgaaataggacttgacatttgttgttcttcctcttctgttattcatttattcactcatttagtagttaattacttcctagtgccagatagttttctaggtactgaataaacaaaaatcctattgtcatagttatgtttttgtggaaagaacaacctgatagactatcgtgaaaaataaatgagttagtatacataaaacacagcccatgagatatagtctgtaattatcatccctgcttcatttatttatttatttatttatttatttagagaatggatctgattctgtcatccaggccggagttcagtggctggatcattgctcactgtaacctcaaaacacctggcctcaagtgattcccccaacctcggcgttccaaagtgctgggattaaaggcatgagccactgtacctggccattgctcctgttttaaagatgaggaaactgaaagtacagagaggaacgtgacttgctcaggatcacacagccaatcagtggcagagcagtctaggcagtctaggcctgaaggcattattctttctttctgttctgcgtcaaaaaccctaggcaggcatggtaaaaagactgaaagagccaaggcaacataggtacctgaagaatgggagaacacctatgaggactgctagaaattttaggcagccctttaaaggccttgggcaacaatttgaacgtgactcatgagtcagttaattctctgcacctttttttttttagagaatacaatggataaagcaatgacctttgtaacatgtaaacctgtatttgaatcctttcctctccatttaattttgcagagtcaccttttcttcattagaaagaaattttatcccaaagagattatcgtgaggctcaaataatataggtggaagccctttgggtttaaaaaaaagccttttctgtcatttctgggtatctcccgtcagtgattttagtaattgtttacctctctggctcttcgtgagaagacaaattgtaggaagaagtggaggatggcattgggtaggatgcttagttctagttccaccacttccttaggtcttttttttgtcccccaagactatatcatttctgtgttctcttgaacctgtaagatttatgagtaatctgtacaatatttataaagtatgaaatctctgccattgtggcacaaaagtagccatagacaatgtataaatgaatgggcatgctgttctccagtaaaactatatttatagaaataggcagtcttctccaattttagtttgctcacccctttcctatagaactcaggtttatcatatacaatgttacacattattcctttgaataaattgtttacctaatactttttaaatttgggcattttctaggacattctattgtttttatttttaacttgtgttatactgcagtgaatgtcttcctgtgtgtagcattttgtttgtgtatgtgtgtcaatatctataaagtagctcttaagaactctggaaacattgtcagactgcttcctcaaacagcagaggtgggagggagcatcggcctaaccctacctggcctgccttaccagcatgcaaccaaggagaagagaataggatcaagagccagtgccagagagaagtacataatacaactttatggagtttaggttgcatcctataaagttaccatgttacactgtttcgatctaccaaagtagaagttttacatagtttagtatgaagttaattttattaaccttttcacacaacacaccctctcatattgctgcccaacaatgtcctgggtctttgtttccatggtcatcatattgagtagggttttagcagggacttgagtagttgggaactgaactcatgctagtgaagccattcttcactagaagcagacatatgggatccagaatatcatgaacaaccagctgggtacagtggctcacacctgtaatcccagcactttgggaggctgaaggaagcagatcacctcaggtcaggagtttgagaccagcctggccaacatggtgaaaccctatctctactaaaaatacaaaaattagccaggcctggtagcacatgcctgtagtcgcagctacttgggaggctgaggcaggagaatcgcttgaacctgggaggcggaggttgcagtgagccgacatctcgccagtgtactccagcctgggcaacagagtgagactctgtctgaaaaaaagagaatatcatgaatatcaccaaagataaaagcaagatgcggatatgagtagcccagagtaacttttcctgtgctatataacacagtgagtggtgattcccacaattcaagtccagtttttctggattctaaagccatacatttttaactctccccctaaatatgatttgaattcagagagtcagatgcaataaggtaattttaactttaagtgtagtttagcccacacatttctctaaactgggggttggcaaactacaaacctctttttgtaagtaaagttttattggaacacagcctagctcattcatttatgtattccctttgcaccttttaggttgagtagttgtgactgaggtcttccagccttcaagcctaaaatatttactatctagtccttcaaaaagaagtttgccaacctctgcaaacaagtgaaataatgtgtattagagtagagcaggagtccacaaactacaacctctggagccaaaaccaccctactgtctgtttttgtaaacagaaattttatagaaacatagttgacccctgtgccaatttgtttgagtcttgcttttgatggcttttgtgctacaagggcagagttgaacagttgcaagagaactaagtggcctgcaaagcctagtggtctttgctgtctggccattataggaagtgtttaccaaaccctgcatttgatcatggaatcccagaatgtttatacctttgaggatttttttttctactttccatattttacaggcaacagaactaaagcctcgtaaaatcttgcccaaggttctacaaatagtcttttctattaaattaagtcagagcctgaaattgtctgtgcccaagtctctcctcagaaatttagcacagcattttccctttctgtctcccacatgctacacagtcatcctggatcatgtgccccgcctccatgaggagatgttctaacatgagggtgactaggctctggagccagagcatcttagttcaaatcctggatctgttaaaaataatagttatttttcagttctaacactgaaataagacaaaaggccatattactgaaataaagtgtaaagaatatatttaatactcaggttactttagccccctcatgatcagaatatgctaataaattgagagattgacagaaaaaaaggattctgtttcactgtggctcacacctgtaatcccatcactttgggaggccgaggtgggtggatcacttgtctggagttcaagaccagcctggccaacatggcaaaaccccgtctctactaaacaatacaaaaattagccaggcgtggtggtaagcacctttaatcccagctactcgggaggttgaggcaagagaatcgcttgaacctgggaggtgcaagttgcagtgagccaagatcacaccactgcactccagcctgggcaacacagcaagactccatccctggaaaaaaaaagttcatcatttgttcttgtagtttcctagtgtggcccttgtctcagtggaaaattgtagtgtgatagactgaggagaattctgtttctgccacttcgcctgttgccttggtaggagctccttatctctgagctgagctccttttgtccttggtaaaatgtggttattatcatctgcatcctcatagtcttcttgtaaggactgtgaagtcacttttgaaaaatgccttgaatatgccagatggtctgttttctttcttttttgttttgttttgttttgttttcccttggccttcattcctggaagtgttttgttatatacattttgtttggtggccaacagtgctaaccacagaaaagtttgtatgtcttctttttctagaataattcttacagtgtaacctctcagggtgaagtttttgttttgaaaggggcacatttactgtgaatgagagccatggaaatggacctgaaatttgaagacagattttacttggttttcttttctcttatttgtttgcagtataaagaagagggcagcaaggtgaccacttactgcaacgagacaatgactgggtgggtgcatgatgtgttgggccggaactgggcttgtttcaccggaaagaaggtgggaactgcctctgagaatgtgtatgtcaacatagcacaccttaagaattctcaggaaaagtgagttgctacaaatgagacatacgtttagttttgttttatagtatatatgaatatgtgtgtacatttttggaattttagtttgattatacaaaatatctttggcttagaaatattaggcatgctatgtaaaaccttactggaaaaataaattgaccaacattattgagagtattttttcaaagtgttccaaaagtaatggaccaatgattactttaaatgaaatcatgtaatggaccacagaattgcaaattactaataaagaaaagccattttgcttattgccatgtaataacatgttgcatgatacaagtagatacgtatgtttatgctgcaacaagtataggtgatactaattgggcaacttttaaacaagaccataaataactgaaatcaaagttcttagtatttatgcagcctgttggtttgcgagggctgccataacaaagtaccacagactgggtggcttaaggaaggttgttttttcacagttttggaggctagaagtccaagattgaggtgttgtcaggtttggtttcttccaaggccacactccttggcttgcagatgtctgcttgcttactgggctcctaaacagtcttttctgattgtcctaatgtcctcttcttataagggcatcagtcatattggattggggcccacccatatgacctaattttaccttaatgacctctttaaagctctgtctccaaatacagtcatatggctgtgatacagggggttagaatttcaacgtatgaattttgagggggacacaattcagactataaactgcagttaatgtttactgttaaattaaatctataactgactaaaccacacaaacaggagatttcaaattagactttattagttttggaaggaagagatgaaatgttgttactttttctgttttatgtagttgtaaaagccactaaaaatgtacatgtacaaatcatcccaagccaggcaacattagtaatgaatgactgcagcacagaggtaagagagatgatttaaaggaggatgaattgtctgcaaaggtgctgggcaagatctagactaattcatccccttcattttaagtttaggttttaaatagctttgtttggcttgatcctagagctacacatttacttttaacttgtttactttgtaccctatcatttaggatatgctatgtactattgtactctatttgatatttcaaacattctctcatttagtgaagaagctcccaaccggagtgctcagaacctacattgcctcacctgtgaagtgagcatgtgggactgaattgcctttgaggtctctttcagctcttaatgatctgttatcccatagtaagatacattatttttaatctcgttggatcttaaacaccaaaaataatagtatttaagacgtaggatgctatcttgtcattattttaatgcacatgtcaacacacgaggttttgctagatgttatgataaagcaagcgaaacagcaggctactgctcctcaaatatctacagtcaatgaaatattgactggcgttgtgggaaaatatctcaaaagtattttatttacaatttaaaatatattcttttgcctaaagaaacaatgaaacaactataacttgtttttgttattgtgttagtgtagtcatacatatgatacagttttataatctgcttgataagggtacgtctctgggtttttcacactttgcaacaagtgggaaagaacttcgacaaaaacattaaaacattatcaacctggttgcacgtttttctgattattttcagtgctcttaggtttttagaccatatcaaaattctctctctacacacatgatttataagggaaagaaaagtttgcagtatgcctaaaatgttcctcaggttaattatatcttgttttgcatagttgaatgtttatggaagtcttagatagtgagtcactctgaaaccacagactcttttttaatagtaataatatggtgagttctataattcctagcatctagcacacaggtatgataaatgttttaattaagtgaataatcagcttcctgaatttttctactttgtaaatatgctctttgtgtgttgaatctatttacatatatatccaagcatttggcacaaggtaaaccaatgtggctcagattttaatgttattgtgaatcacttggggatcttgtttaaaaaaaaaaaaaaaaaggagattctgattcaggtgatctgggctgagtacttacagtatgcatttctaataaacttctgggtgttgctactgatattggttcaagaactaaattctgagtaacaagtataaaccgaatgtccataaagtataatttcttttagtatcatatggttataatgcttgcattttgtatatatgttgcatacaggttttgcttttctcttttttcttattaaaaaggttataaaggtacactgtagaaactgtagggagtaggggaaagcttggcatctcatgccaccattcagaggtaaccatgtttggcattttaaaaatgcatttatagtgtgtgtgtgtgtgtgtgtgtgtgtgtgtgtgtgcgcgcatacatatatatgtatgtattatacatatacgttaatatacatataatatacatatattactgtgcaaaagttgataaattgattatgattatgtataaactttgatatcttctcatatttaatataatatagttgtgagcactcttccatatcattaaataactttctagacattttaaatgaatatatagaaaatgaaacatcattaatcagtcccttatcttagaatatttatttcggttatttacaatctattagtagtttaaaagtacttcatggaaaatccttatacatgcatcttagttaacttgaacttttatttttagagaagacatgccaggctgttctaggctattgatacatattgccaattaccttcctgaaagattgtaccactttccacttaggcacagagtgtgaatgcctgttttaattactctatttacatcagtaaagactatatctgaaattatctcatttttggggacaggtattctaataggctctacaagtatgatcacaactttgtgaaagctatcaatgccattcagaagtcttggactgcaactacatacatggaatatgagactcttaccctgggagatatgattaggagaagtggtggccacagtcgaaaaatcccaaggtaatcaagcacacattttatcattaataaaaatatgaatgctgaataccatcctccctcctaagcagtcctaccagtgttgctcgccattttattggtcatcccagttgtaactttttatgtgatctgttaacgatctttatctcctattgatacatattctgtcactctccaagtcctatttatgagtttttctttcacatgtctgttgtttccattgccccctttccattttctacactctggcatgcagctttgtcctgtttcccccatgctatggattagcctcctgccggtaaccacctgaggggttcttcctgcctgctgcataaagaaaaaccatggcaatatagtagagaaagagcttaagagacactaggctggccatgccacgtgggggatggagttcatattcaaattatcttgtccaaagctcataggtaggggtttttcaaaggcagcttgggggaaggggtgggggtggccaggtaacagatgcttgctgctgattggttggggtgggtgaaatcacagggagttgaagctgtcctcctgtgggctgaattgcttctaggtggggccataggagtggggttgctgggtccaggtagaaccacgggtgtcagacatgcaaaaataaaataaaataaaataagataaggtaagataaaataaaataaaataaaataataaataaaataaatataaaatttccctgaaaagatatttcaaaaagccagtcttagattctacaataatgatgttatttgctggagtaattgatggagttgcatgtcttataacctctggaataacggctgacaatctctcaagtctgcgccttagctggactcaggttcctcttctccccacagcctgactgcctccattagcttcacaaaagtggttgggtttcagggcaaggcccattgtcatttaaactgtagccgaaatgacttccaaagttagcttggcccaatagcccaggaatatttaagtggaaggcaagatgggggatgggttagcttagctctctttcactctcatagttttctcactggtataatttttgcaaaggcggtttcatgcctgccatctctttcgtcgctacctctcccagttcccattcttagctgttttatgaaatgcttctagtttcatcctcttataccaagttctgggagactgatttgagtaataataaaactccagtttcccatacagccggctctgcgtgaattaaactcattttctattgcaatttccctgtcttgataatcagttctgtgtaggccgtgaggaaggagaacccgttgggtgattacgagactgtgttactgcccactacctaatggatacatttagcctggtatccaaacccatctaattatgaccataactatatttatcaccttgctctgctttcaaacgatatgacacacaatgaatgaaaactttcatttttcatcttcatttgtgctgttccctttgcctcaaatagccctcaacttgcctacagtaactgtaaaatttgccacctaaaaaaaaatctcaaaatcctctctatgctttgatgtccagcaaaaaaaaaaaaaaaaaaaaaaaagttatcagtatagctctattactctcaaccagaggtggcatttttcatctttacccataagccccatggtatatttcttagtttgggaaattatatcataatactttgaatctgtctagtcagaaatttagataatttaaaaaaaaattatttttctgaaagtatagctggatctagcttaggatctacatctatctaatatagttccttaacatttgttaaatggccacggataagtcctgtaatgccatactttgctttaggatcatgtgactaaggggtaaggaattggaaagcaatggggagctagcagaatttgaaaaattatataggtaggttatttttccttaatacattgaaatagcctcaaattctcagagaatacaatgtttaatcctctaatatctgtagagttcatggctcaaatttgtattatttgaataaactactaatagattaataattactcaactaaaacactttgaaatgtgagagttcccttatctccctcgcaggcatatgacagaggtgtggcttctcacacctttggttgcccttgccctaccacccaaacccctagggggagcatgcagaggggcaggtgcagaggccatggggggtgcttttgggctctggccccacagcagtgtctaggagtggatgttggagactcctgaagcccaagtgggcatgtgttacagtgtgctctttcagcttagccgtctgcagatggcttgtgttaatcaggtcattagaccccatgccttattgcaagggcaggggtccaatgtgacagcctaagttcttgctcagtgtaccagaagaattggatcacacgtgggctggaaggatgagcacaaggttttattgagtggtggaggtggctctccgcgagacgactctcagccagagaaggaggatggaggggaaaggtgttcttcccctggagtccacttgttcctgttctcctctgggttcaaatacctcttccctccttttctgctgtgctgtcccaccactctccacagctctgtgccgctctgttcctctgctcctctggatgttcagctccttgtatctgtgcctgctaagattttgggtttatatgggggaaggatggggggcatggcgggccaaaaggcaccttttttggtgtgaaaacagaaatgcctgtcttctcttagggccttaggtcttcaggcttgagggtggggcctttgctgagggaccaccctcttctacccagtatttccctgtctcctgtccatatcaacattactaactttttcatctgcagactaataatgctaaggtgtggcatttttcaactgtgagactatgtgaaggtttttcctgtccaactgatggcatcctcccataattctacccctttcttaaaagaatcttttgcagtatttctccaagtttattctagagaatttcttgtctgtgaaatgctctagttaatcaaaattggaaaacggagcatatcatatccccttctcaaattcaccaaagtgaagtcctaatgtgtcttaatgtatctgcatgagacaggaagctgagatctattcaacaacaaaaatccaaacaagcatcaagaggaggagtgttagcacttgagcctagggagactgtggctcctgcctgaaagatgggagcctcagtcacagctgctttaccaagtgtcatatgctatgtttctgaggactcctgctaaagctcccttctccctccagccaaccacttttgttttagacaagggctgggtttatgaaggactgttttcatgactaaagctttatagaaggtttaagataaggagatggaattgagtgaagtaggaaatatgaaagcagatattataatctggcttcctgatttttcactagcatttttgtttataaattagttctgttctaagaatccaatgacgtaatagaaactctcaaagattcttaacttgagatatagggagtctttgaaactgctgaaattacagacagcatttattgtttatgagcatttctgaatctagagctttcactagatttgtaaagaatgtgggccaaaagattaagagccaatcctgtatcttgtactcaaaatgtttgtaattctcacctttttatcccccagactcctcttgctctctcttcattttcacagtgttactggaaaggggtcctgatccagaccccaagagagggctcttggatcttgtgcaagaaagaatttagggcgagtcctcaatgcaaagtgaaagcaagtttattaagaaagtaaaggaataaaagaatggctactccatagacagagcagccctgagggcagctggttgtccatttttatggttatttcttgattgtatgctaaacaagggatggattattcatgcctcccctttttagaccatagagggtaacttcctgacattgtcatggcattcttttttttttttgacagagtctcactgtgttgtccaggctggagtgcggtaaagcaatcttggctcactgcaacctctgcctcctgggtttaaatgattctcctgcctcagcctcccaagtagctgggattacaggcatgacccaccatgcccagccaatttttgtatttttagttgaaacagggttttgccatgttggccaggctggtcttgaactcctgacttcaggtgatctgcctaccttggcctcccaaagtgctgcaattacagatgtgagccaccaaacctggcctgtcatggcattcttaaactgtcatggtgctggtgggagtgtagcagtgaggaagaccagaggtcactctcatcgccatcttggttttggtgggttttagctggcttctttactgcagcctgtctgttctatcagcaaggtctttatgacctgaatcttgtgctgacctcctatctcattctatgacttagaatgccttaactgtctgggaatgcagcccagtaggtctcagcctcatcttacccagctcctattcaagatggagttgctctgggtcaaacacctttgacaacatcattaagcctcagttctcacactgtttttgttttgtttgtgtgtgcaatgatgggcaaatctctgccttataggatggtagaaaaaaggaacttaatattgtaatgactgttttgtgccagataattgctttaaactgtatcagcatcttatttagtcctgttaatgatatgaatgttatcttcataacagctgccattttattaaggacttatcagagaaaaacactgttctaagcacttgttacccattattacattgaattttcataacaaccctttgaggtaagcatgattatacccactttaatagaagtgaactgtagttttgtaatgttaggttccttgccaaatgttacacagatagtaagtgataaaatcatatgccctgaaattacattatgctgccaaacttaaatttcttttttatcctttatattagtatattcttaggtttaaacaagacaactagttaacacatactagattttgtccacagttcctggctcataactcccatagcccttgtcactatcttttaacgttggggcacattaggcctcagaagtaggcctcagaaaacagagtctctctctctctctctctctgatcttcttccgccctcctctcacctgcccagggcagcactctaatcttctcctgcctttctgatcttgggtcataagaccttcatttccaaagatgtcctgtgtcataccctaaaggaaggaacactgaacagagagaggctcagaagaatctggacaggccttgctgtgtttacatcattccctttatgtccagtcacatctctacatggttgtcagttgtgcctatttgatgaagtccccatataaggctcacaaggacagggtgcagagagcttccagatagctgaacaagtggaagttcctggagggtggcgtgttcagggagggcatggaagctgtgtgccccttcccccataccttgccctactcatttcttcatctgtttcatttgtagtatcttttataataaaccactaaacattagttagtatttctctgagttctgtgagtcactctagcaaattaattgaacccaaggagggtgtcataggatccccacattatagctggttggccagaagcacaggtaaacaacctagggctttcaattggcatgagaagtagggggcagttttgtgggacggagccctcagcctgtgagatctgatgccatctctaagtacacagtgtcaaaactggattggaggacacccagctagtattcactgtgaaattggttgcttgcttgatttgtggggaaaaacccacatgcatttgatcacagaagtcttttgtgttgacagttgatagtgttcagtgagagaattaaaaaaaaattgagtttcttcttcaacatactctctcaatgtgaaaccacagaaactatttccattcaaagatggaaatggtttgtttgcatcttagtttttatttatacatcttagaagaaatgtccaagctttgttttttctctcaccctatatataaaattacctatgaggcacagatttttatgatccttgattatatagactttgtccaaattgtgtgttttatagcattactgtaacttgttatagtaatctttgtgtatattatgtctcttaacattgtcttccatattgttaatgaccatctcatatttatctctgtatcatgtatatcttcaaccaatgtgactggcttaggagaaaaaattagtgaacaattaactagtgtttgtgtaatctatacaattgtcaaggttacaattgctatttttgaagaaatcgttgttgtttttctctttgtttcatctcagttccattttgtcatgtattcttttttttttttttttttttttttttgaggcggagtcttgctctgtcacccgggctggagtgcagtggtgcaatctcggctcactgcaagctccacctcctgggttcatgccattctcctgcctcagcctcccgagtagctgggactacaggcacccgccaccacgcccagctaatttttttttgtatttttagtagggacggggtttcactgtgttagccaggatggtctcaatctcctgacctcgtgatccgcccgcctcggcctcccaatgctgggattacaggcgtgagccaccgcgcctggccccttgtcatgtattcttaacctgtgttatatctaagagaagctgtgagagacgggaccatttgtggataggtgcagagggcatgaagtagcccagaaagaatctttgccattgactaaattttagcctagtaaaaaacatctggtaaccactgaaaaactagaacagtgtgatatgacaatgcccagttgaataagaaattcaaatagtttatagtaacaaaaaataatttttaccacattgtgactagtgccctaaaaacaaatttgaaggagcagagagagagaggaagtgagttttcgctgggggctggtgagtggaggctactttatgagcagttttgaaaattacaagttagggaaaaactcttaggggagttttaagtggtgagcaacaggcacttgaggttacaggagcagcagcataaagatatagaacagagaggccatttggcagtcttggggaaactccaagaagtcgaatgtgtctaaagctgtggttctctctctgtgtgtgtgtgtgtgtgtgtgtgtgcgcgcgtgtgtttgtgtgtgtgtgcatgtgtatgtatgtgtgaaatcgctaatacagagaagctgttagaacaattttctcacttcccaaaaatgtccgttcattcatgggcctaggcaactctcctttgtgtgtcttacagcccaacactgtcatataaggtgtggttctataatgaaacagttttatctgttgtttacggagctagtcagcctgtgttatgcttgttactggttgagggtgtccaggttcttggcttcttgaacaaagaattggacaaaactcacaaatgaggcaaggaaagaatgaagcaacaaaagcggagatttattgaaaatgaaagcacactccacaggatgggagtgggcctaagtaaatgattcaaggccctggttacagaattttctggggtttcaataccgtctagaggtttcccattggttacctggtgtatgccttatgtaaatgaagagggtggagttaagttacaaagtcatttactcagtataggccttgtgttaatggagagggtgttactcctgggggttgtggcccatgtaaacggagaggatgaagtgaagtgacaaagcccttcgcattcctgccattgctgaagtgtttccactttatttagttctaggaagtcagtgtgaattggccttatgttccctgcctccagaacctgttctcctgcctcacatagacccttttttccctttgccaacttcacttcttttacagccacctcactaccaatgtgtctgtctcctaagtcaaacatcagtgattcctctgttttctctaaacccttcttatgtcttctacttctcatctctttcttggtcaaaaatctttcaaaaatgagtaagaatgcagctattcaggcaaactaaaaataacatcacagtgatatacaaaaccagtgtcatttcacaaaggaaaattatcaatactagatcctgaaaaagaaacagcgaatgaaagccatttacacaactccattgtgtaattgacacattgaatcactcataaaacaggtgctctgggtctgaatctagatcctagctagtctggtagctgaaatcatagaattatagtagagtttaggaaatcatcctcaaaggaaagattatatgttgatatcaaatgtatatttcctttctaggcccaaacctgcaccactgactgctgaaatacagcaaaagattttgcatttgccaacatcttgggactggagaaatgttcatggtatcaattttgtcagtcctgttcgaaaccaaggtaaaaaaataagcctaagttttttgttaatttgtttggaactatttattgaacagttgctctgtgtgatggatttcggggatacctagatggaatgggcatgatcccctttttacagaaatagaaaataggtggcctatgaattattctttccttttatatccatgacaaactttagtaaaaaattttcttttctactgagcttagcatttattcagtactcttctcaatatattttccaggtagctagtgacaatcagagtgatatgtaagacaaactcatttgtcctcctagtaggaaagattctagtagaagcaaagaattgtgtaccattctgcaagtggtttgttggaatctttctttgatacctgttcctgtattcccccacccccattaatttagtcattaattactacatgaacccgtaaaataaatccttaaattattttcctggtagattttttgagctgtgtaaggacctttcaattcactttacattagaatacgatatgtgatggtaagtattaacccagcttcctgagtgatggcgtgagggcggaacccaggttcatgaaaagtattcctattattgaattttaccagttattttcagaagtttgatacaatgtgagttgatttcataacatgtcctctaactgcacttgatagcaaattatcttgttatcctgagttgtagccaacaatgacttggagaatctatgcaatactcagttttattacttctaagctcattttgaagataatactacccatggctgatttgttactataaaataggtttagtatttgctgtctggaaacattctgattagtgtctcctgggaggattataaatttatagtacccaaagataaactgttgtttccctttcctaaacttttagtgataatcagtctctgccgtgtctcattttcatcacttgccctccaagctcccatctcactgaattcttgcagtgttctgaatgttgagagccccaagtgggtcttataacagccagtcagcaacatttctgtttttcatctgacaccaagggtctcgtctctttgcttttctaccagttattctgggctcttcagctctaaagaaagtataggtcctgaaatctttccctaccttctcaatttcctggggagggcttctttggaaagtgggattggaaataagataaatttgaagataattgagaaatgaatggaaagtgaaattgaagggtccatgttaagagattgcaagttatgctatcaccaaatagattttttgtgcctgagaggattaattcatagtgcatattatgtgttgactttatcattgaggtcctggcacatgatagcattggcatgatataatttgagctactgatactatagtgttgcttctggtgttgttaccagaacatctaaaatatattaggatttttttaatggcagaggaaatgaagactaatatgacatagtccttgtcctagtgatttacagtttagcaagacatacaagcaaaacattaaagtaaagcatgataactactttaataaagcattttttaaattcattggtaacataagagaaggtagaagagtttagcaaacccttcccaaaagaaatgattgacaagttatatgagataataattcagggaaaggaaattcgactttctaaagccaaattatttgacattggttttcatatagcttggtaaaagctgttattttctcccatgttctttattctttgactgttataagtatgatttgtacagagaaatggcaatttcaaaacagagggctttgatggattaattgctttgaattgatccctcatctacagtatcttgtcaggtacttgagaaaataatgtacttaaagtttcctcttttgactttcttttggtattctatactgtaagttggggaaaaaagtattttctcttcctgctaattgggctacttgaaaattcccaccaactttgccaataccagtgttctgtataacccagaattcagaattagctgcaattaagggaattcacagcttttctgtagtcagagagcaaattgaaattaaagaaaaaagaaatagtgggaggacaaatgaggttttacctttacacttgaaaacagatttaagaacaagccttatacctagatttattaatactttgaggtatgagagggaagagaagcttagaaatacggcagaatgggctttctttgttcttctcccagctatgctgtttttatttattattgtatttttaagagagaagggaagtgtctctcctgggtcacattaattaggaaatacagagtgttttcataatgcgtaaagtctagtccatttaagtcttgtttcaaaatgctatttatattatttgagcaggaaggcagagaccttaaactgctccacccaattcattttacacaaaagattaaaaagaaaaaaacagtgtcaaaaggtcaagtgcccagtgttgcacaactaatgataggcaaaacaagagaggaggggaaaaaaaagaatcctgactcccgactcctagttcagtgtgttcttcactgttagaaggtgctgctgaacatagttataccatatgaagatcacactatctatttgagattgtagaaatttgattactgcagagctctggctgggctagattcacttcttattctttattgcattgcagtattcttaagagataaatggctcttttagaatcagattggccttggctgttgaaatgaggcattaattaccttggtagctgacacattcttacaggtcaggggcttgatgaagtttatcttcttcccttgttcctgtgattgctctgtaaatagaacacattcagagcccttgaatgcacttgcagcctgtgcctcccacagtgatcgatggtcagataatgggagtttaatgaccagtactgagagagattatttccatggctgctatgggccaagaaagctgggtggtcagaaagggaccttttccagactctcctgggttgtgttatttctttgacattggtttcctttcatgaggcgccaaggtgtatttgtaagttgtccagtgttgcacagctaatgaggggcaaaacaagaaaggaggaaaaaaaaagtatcctcactcctagttcagtgtgttcttcactgttggaaggtactgctgaacacagttatatgttcagtgtacaatgtacaatgttctttgacattccgtcatttgaaggatgggtcctatggatagtatcatctgcatggttttgaaaacaaaagatataagctaattttgccctgtctagtgactacgagacagggagagaaaatctgaatatttgttaaagtagacacagacccataaattgaaaaggacactaatcctgccttaggagacagtaaggcacttgtccctgctatctattagctgtgtgtccttggacagctcattgcttctttctgagccaccgttacacgttatctatcaagtgagcaggttgtacactagatgaattcacaggtccttcttccaagtgcttttctaatcttcataatttagataatctctcagtagcaaaacagtgtacaatatggtcaatctgagatttttagggggagaattttagggaacatcagaaatggcagtagttaaaaggaaataggactcacaggctgacttctctctataacttcacatggtagaagggatgagagttctctctggagccttttgtattaggtcactaatcccaaaggccccacctcctaagaccatcacttttgggattggggttttaacatgattttagagggacataaaccttcatctcattgcattagagatatttgaaagctcagctcacgtgtattcctccacagctcacatgtattcctccatcacccaacctgatggctttgaacgttgtagacataaatcctttcatcattatcaagaatattgccaaaagcttctcagaaattatgaggggtttttttagtttctaaaatattctcaaagaaagtcccatgtactaatgtttgccttttgatgaaaaaggatgaaatcttaatgattgccttaataagctcaacaatgcttgttagttgagtcttcttattgtgctgattcttataaacaacaacattcagtataaacattaatgtatgtgattcactaaggtttttgcatgattctctgtgaggcttcagatgtctcttggattatgtgtctttttttcatcgccagcatcctgtggcagctgctactcatttgcttctatgggtatgctagaagcgagaatccgtatactaaccaacaattctcagaccccaatcctaagccctcaggaggttgtgtcttgtagccagtatgctcaaggtaagtgttgcatttcagacaccatttatgagctatttacctgtgtgcagctggctgttgttggcaaaggcaaaaggatgatgcagtagagagagcgcagtgtctatagtcagaaaatctgagtgcaagtctggccctatcacttattaatggatgattgctcatggaatttactgtaccatccagcaaaatgtcaatagttactatatattgagtgagctctgcttgttacatatattgcctaacaatgctcaaaactctgagaagtagtaagtataatccctatttatgggcggggaacaggaactaagaaatttttctaataatttgaaggtctcacagcttttagcattggagtttcacttctaatcatcgtctccaaaacccaacttttattaaaactatactaacactggtttctctctgggagaattttaaaattctgtacttagggctgggcacagtggcttatgcctataaccctatcactttgggaggctgagatgggtgaatctcttgagtcctagagtttgagaccagcctgggcaacacggcgaaaccccttctctattaaaaatacaaaaaattagctgggcgtggtggtgtgtgcttgtagtcccagctattcaggaggcggaggtgtaagaatcacctgagcccaggaggtcaaggctgcagtgagccgatatcatgccactgcactccagcctgggcaaacggagtgaggccctgttatgaaaaaaaaaaaatctgtacttaggctttcagatcaggctgtatgtgatgtatgtcgaaaacacagctataattgattgagggagaaacgttaccattttaaagtttatgctttcaagcccagatttggccactaggaatttcccagctcactagtgaaactgctgatgagtgattatttgccagtgagcctttcattctttctaaaatatgtactactagttgtgacttgtaggctataggggctataatatatcaagacaatctttatcctcatgaagcttacagttaagtaagagatagagattaaataattataacaacagagtgaagaacagtgaagaaaaagtacagagttataatatatataatagggccaggactgcatgaggaaggtaggaaagacatttcggcaagaggttgtcagggaaaagacttgcttgagaaagagccaagttgtggggtctggctgcttagcaatgaccataatacctaacttttgctatttttacatgaagtaactaatttaaccctatgaggaaagtactactaccatctagattttacaggtaagtaagcagagatacagagaagttaaactcttcacacggctttggctttaaacctatataggcttcagagcctccccacttaaccactttgccatagctacatccatattaggtgctaagtagatatctgttaagtagaaggaggatgaaaggatagttagctagttggaaaatggatggatgaatgaagtgatgcttaagctaagaacaactttcaggggtaacatgcaaagaataatggagcaaagaagaaaaaatagaaaatgggataatcctttttctactaaggggtaaccatgtgtgttattcatcttcaggctgtgaaggcggcttcccataccttattgcaggaaagtacgcccaagattttgggctggtggaagaagcttgcttcccctacacaggcactgattctccatgcaaaatgaaggaagactgctttcgttattactcctctgagtaccactatgtaggaggtttctatggaggctgcaatgaagccctgatgaagcttgagttggtccatcatgggcccatggcagttgcttttgaagtatatgatgacttcctccactacaaaaaggggatctaccaccacactggtctaagagaccctttcaacccctttgagctgactaatcatgctgttctgcttgtgggctatggcactgactcagcctctgggatggattactggattgttaaaaacagctggggcaccggctggggtgagaatggctacttccggatccgcagaggaactgatgagtgtgcaattgagagcatagcagtggcagccacaccaattcctaaattgtagggtatgccttccagtatttcataatgatctgcatcagttgtaaaggggaattggtatattcacagactgtagactttcagcagcaatctcagaagcttacaaatagatttccatgaagatatttgtcttcagaattaaaactgcccttaattttaatatacctttcaatcggccactggccatttttttctaagtattcaattaagtgggaattttctggaagatggtcagctatgaagtaatagagtttgcttaatcatttgtaattcaaacatgctatattttttaaaatcaatgtgaaaacatagacttatttttaaattgtaccaatcacaagaaaataatggcaataattatcaaaacttttaaaatagatgctcatatttttaaaataaagttttaaaaataactgcat

SEQ ID NO: 10214 - DNA, 379 bp, Homo sapiens
atactagctgcatgcttggaaatttcaccttaacattctgagtttcagagttttgtgcaaaacccacgtattttctgcattaaaattcactataatgatgtttttaccctccttgaactgcagtagggctccaggagtatgcaccatttaaagtttggcttcctggacctcctggcatgctgccacatacctttgatcttttcaccacatggtggcacagaaacagcactggaaggcatagccagggtcggaatcattggaaggcctccaaggagatgagatacattttctttttattgttactgattgaatgtaatttccatcctattttgtgcccagcctcactgctatgtgaacatataaacagacctttgaaatc

SEQ ID NO: 10215 - DNA, 1143 bp, Homo sapiens
agacattgtattcatttctttattgtgtttacatagcacatactctccaaagagttcagggtacttttcaaaagacattgaataatgaacacataaaaatataccaacagtaaaaagtaggaagtagaggagaaacaatcaaaggaaggtgagatcaagcagtggcaaaaggattagctagtccagaggaaatgtcttggatattcattctgtttctcctccacagagttacttcagaacacttttccaaattaattttaactccttcgaaagggggctcatagtacatagcccaagtgagactgcagggaatgaggggaggccaaatccaggcttcatcattagaatgagtacttaaagataccccctgcccccttaccttccacctcaccccagctctagcttgccatatgattaattttcatgttagacatttggattatgatagtcaaggccgcagttgtctaaatgtaaatagtaccgagggaagagtagcacattccgacattctctcagtgagacttattcatcagatgggggctgtgagtgggtgagatttcacacagatggatgggagtctgctggaaggaaaaattcagagcattgaaggttctgcctgtgtgagtgtttgttgggtgaatgaggggactgagtaggaaggagggcaggcaatgaggctttaaagggaagaaggtaggaaatttgaactcatctttcctagtgcttactctcagcccattccctggtttgtggacctgaccccacactgctttttccagcaccactgtctgtgtgagtccattcacttcaataccagagccacctctttgtttcctatttactaagaagccataccagcatgagatctccttgatagtgttaaatcccactgtggaaagattgaaaaatatctcccagccttaccagaggttacgatctagtgtggaggcaaaagacattgagaagaaaaaagcaggtgcctcctcctggctctcctgttaggttaacataatcataattcccctttgaaatgtctcccacatttgccctttaacttcctattgccatgataagcatttaggttattacctaaataacttgttacctcatgccttgattatctaaataaattcttagatggcc

SEQ ID NO: 10216 - DNA, 2180 bp, Homo sapiens
gaagaattagaagatcagatgccaagattggtggcagaagaatctaacagaggtagcacaaccataaacaaagaagaagtcaacaagggaccttttgtagctgttgtgggtgttgccaaaggtgttagagattcaggagctcccattcagctgatcccttttaacagagaggagcttgctgagagacgaaaagcagttgaatcctggaacccagtgccttattctgtggcctctgctgcaatccctgctgcagccattggggagaaagcaagaggctatgaggagagcgaaggtcataatacaccaaagttgaagaaccagagagagctggaagaattgaagagaaccacagaaaaattggaacgtgttttggctgaaaggaatttgttccagcaaaaggttagggtaatacctcaccactaggaataagagaccatagtaaccaagggagcgggacattggtgccctgattatttaatgttctgaggcctttaaataaaatatgcccctgaactattctgtggtgtgtttcagatagagtaactgtagtaggcttcctgcccattttagggtattgaaaaggcccataagtagaggaatatgtatagtggaatcacaggatgaccatatgaggaacggtttttggcgtgctcttttgtggggtcattgaatttctgtttcttggactgcaggtggaggagctggaacaggagaggaatcactggcagtctgaattcaagaaagtccaacatgaattggtgatctacagtacccaggaggcggaaggcttgtactggagcaagaaacacatgggttatcgccaagctgaattccagattctgaaagctgagctggaaagaaccaaagaggaaaagcaagagttaaaagagaaactgaaggaaacagagacacacctggaaatgctgcagaaggctcaggtctcctaccggaccccagagggagatgacctagaaaggttaattactagggtttagttatcagcttgtgagtgctaatgggaagcatcccttaggacccccacttactggccgtagacaaaggaggaagccttaattcacaggccaccaagaattgagtaattacttcttagaaagctgcagccagtctccctgtgcttggtggcgttgtgctttcttctttctagctaatgaaaacataactgttgagaaatgtggttccattttgaaggggcttcattttattctgttggttaatgacttcatgtcatctcttctcctgccccctcactccttcatacagggctttggcaaagcttacgcggctacgtatccacgtcagctatctccttacttctgtcctccctcacttggagcttcgtgagatcgggtatgactcagaacaagtggatgggatcctgtacacggtgctggaggcaaatcacatactggattgagcaccagactgtatacccttctcttctcttatcttctgtctgttctcttttctctccctccctcacgtctctctctctctctctctctctctctctctctctctctcaccctcacctttatgccttatatagagaatctctgtgtaaatcctggctcataatcagtctcctttttatcagttttggtgtggagaaagaggccagtttaaataggctttcaagagtctagggtcagaaaagcaatagtcactaagctaggtgacctgaaagctttaattttcatgacctggatatgtggtctattgtatatctttttctgaaatggtttgtattcatttaggttagatcaatcagcagatattgggtccggtataccaggtattattttggggtaagctaacaagtacaactcatgtttgcagccttcgaagatgtaacaatctcgttggaaacataagacatacatcacattatacacaaaagtgtatgatatgtacaactgagtggtacagatatgacatggaagatctgggggaggaagttcaaggaaggcaccacaccagaaatgggacctaaattaaggcttaaagaatgagcatggccacactgtcagtgagtgttctttaggtggtaggactatggttgatatttttcttcttcctatcttcctgcctttttcagattttcaatattaaacttgttattcttacattggaaaaaaataaattgtttttaaaaagatcaa

SEQ ID NO: 10217 - DNA, 13026 bp, Homo sapiens
gccaggtcgtgccagcatccgccggacgccggaagtggttctccgcccctgccactgggccatggagactgtggcacagtagactgtagtgtgaggctcgcgggggcagtggccatggaggccgtgctgaacgagctggtgtctgtggaggacctgctggtgaggcctggcccggacagagggaaagggaaggtcggagggcgggtcctgaggagagtcaggtaggggccgaaccctcctcccggcatcggcttggccgagggaagccgaactacggctcccggcagcctccacagcgcctggctcctgcccggagggcctgctatgccgcagaggctcctgggagttgtagtgtcctgagccccccacacctcagactacgggcctggagcccgaccgtggttagactgacgggatctgggatcatgcaggagctgtgagctcagggcgctcctccagcggtggaggaatacagtgaccatcataaggtgtcacctattactgcgtccggcacggtgctaaggcatcgcatgccagatctcagtctttgtagctctaggaggtaggcactacttctattcctggacaataaaaggtccaggcccggcagggtggggcaggatggggccagcagcctcaaatgaggaccgcgtgggctgttgagcagttctgacagcgtgtttactgttcggccgccggggtcagctgctccgggagcggtgcctggagctgccaccaggtggcatctccgctcggtaccgccgcggggaggggagaccgggggcctctgtcccaagagctggcccgcaggcccggaggagccgaaagcctgggtcccgggcatggagatagcagaagctggggtgccagataccgagacctgcgagggaaaggggcagagccagggagatggcatgtccagatagagaatggttgacgccctacatttctaaatgattcctttcctcccctgtggcagaagtttgaaaagaaatttcagtctgagaaggcagcaggctcggtgtccaagagcacgcagtttgagtacgcctggtgcctggtgcggagcaagtacaatgatgacatccgtaaaggcatcgtgctgctcgagggtgaggcgctgtactctccctttcccgctgccatctgggctgctctgcgatgtgggccccgtagtccaggcacctctgagttgtctccggtagatttactgcaccaagggctatacttagcttgacgtctcccagtgaacttttggctacttaccgcccaccattgttttgccagacagagtgtagcatgtcagttcccccaggactgtcttgatctgggaaagtgacttgaggtcacccaactaatcagttaatggctgaattgggactagaagctcctgttttgtgagacctaggcccatgcccttccccccaacaccaccaccgtgttgcttagcagctattgagaatcttttgtggcatggaagaggtacagaggactgtcctacaaaattgtgagcagatagtgctttttgttttttgtttttgtttgagacggagtcttgctctgtcccccaggctggagtacagtggcgctgtctcagctcactgcaaccaccacctcccggttcaagcaattctcctgcatcaacatcctgagtagctgggattacaggtgcccactaccacgcccagctaatttttgtattttttgtagagatagggtttcaccatgttggtcaggctggtctctaactcctgacctcaggtgatctgcccacctcggcctcccacagtgttgggattacaggtgtgagccacctcgtccagccagatagtgctttttggatgggaaccctatttcctattggttttaggtgggtcatcatttgtcagaggccacaatacttaaccacttagtttctctgtagctccttgtgttcaaataatcatttataagcacacagtcagtgtacagccatccctctgtagccatgggggattggttctaggaaccccacccccacagataccaatagccacccaagtcccgtatataaaatcgcatggtatttacatgtaacctgtgcaccttctcccatatactttaaatcatctgtagattacttataataccaaatacaatgtaaatgctgtgtaaatagtatactgtattgtttagggaataatggcaagaaaaaaaggtctgttcatgttcaatacagatgcaactatcttttttttttttctgagtatttttgatccatggttcgttgaatctatgaatacagaatgctgactgtgttagcaaaggatgcctattgaaaatctataaaaatggccaggcacagtggctcacacctgtaatcccagcaccttgggaggccagggcaggcggatcacgaggtcaggggttcgagaccagcctaatcaacatggtgaaaccctgtctctactaaaaatacaaaaattagctgggcctggtggcgcacacctttaatcccagctacgcagtaggctgaggcaggagaatcacttgaactcgggagacagaggttgcagtgagccaagatcacgccattgcactccagcctgggcaacacagtgagactccgtctcaaaaaaaaaaaaaaaaaaactataaaaataagactctttcttaaaagatacaaataattttaccctatgtttgtctacttcggcaattcagattttcaggtttattctacagcagggtgtaggtgtagaagaaacagcctctctaagtgttgccagtctagttgagaaaacagtacagacaggaagatttataaacacctgcagaattatttagcaacaaattctagtgcatacagtacagttatcctctgggaagtctctgaattaagaaagtcaggtggggccaggcactgtggctcatgcctgtaatctcagcactttgggaggccaaggccagaggatggcttgaagtcaggaatttgagaccacctggcctgtctgtgtaacaaagatgtttaaattagccaggcatggtggtgtgtgcttatagtcccagctacttgggaggctgaggcaggaggatcactgaccccaggagtttgaggctgcagtgagccatggacatgctactgtgctccagactggagtgacagagcgagaccctgtctccgttttttgttttttttttcccgagactgagtgtgcaatggtgcaatcttggctcaccgcaacctctgcctaccgcattcaagcaattctgctgccccagcctcccgaacagctgggattacaggcatgtgccaacacgcccggctaattttgtatttttagtagagacggggtttctccatgttggtcaggctggtctcaaactcccgacctcaggtgatccgcccggctcagcttcccaaagtgctgggattatagtcatgagctacggctcacggcccaccctgtctctttaaaaaaaaaaaaaaaaaaaaaaaaaaggaaggaagacaaagtcaggtggggtcttcggggaaggctgattgaaggtgagttttgagctgatttttttaaagggggagggagtcctaacttttttttttttaaacaataattgtacagcaggcagtttagttaaaaccacaacggcagcactttgggaggccagggcaggcagatcacttgaggtcaggagtttgagaccagcctggccaacatggtgaaactccatctctactgaaaatacaaaaattagccaggcgtggtggcgggcacctgtaattccagctgctcgggaaaccgaggcaggagaatcgcttgaacccaggaggcgaaggttgcagtgagccgagatcacgccattgcaccgcagcctgggcgacgagtgaaactccgtctgaaaaaaaataccacagcagatgccaaaactgagtcacgctgcctttggcttctccagggccccgatttcctcatttcagttggatggaccagttgactgtaatactgataaaaggcatgttctgtcactggggtgttggcacagctggggttcaccctgtcccagagctctggctagggtgctgggagtgactggagctgaaagggaggcttaggactgtgaccctcccaggatcacagaggcattcagagagtggaaggggcctctgggacacagtattaggaaagtattaggaaagaagcatttctcaccctcttctctgcccctccccagagctgctgcccaaagggagcaaggaggaacagcgggattacgtcttctacctggccgtggggaactaccggctcaaggtgaggtggggaccccgttcccttcaccctcctctggggctgcaggaccttcttactgtgtcctccagggtggagccctggacagcgggaaggctgaaggggtgcagaggtgcagagcggtgtcagatgaggactccgagggaagatcagagtggcgagggggtggggaggaaggtgacgtcaagagactgggtgcaggcccaagccttgcgctgttatctcccgcagagttggggttgtttgtggactctactccgtggggtggggctggagggagggagtgggtggaggtcgagggaggagccccagggctgaagaagggaaggcccttcacgtgggcagggggagtggtggatactgaggtgtagccggcccagtggctcacgcctgtaatcccggctactcaggaggctgaggcgggaggactgcttgagcctgggagtttgaggttgcagtgggctgtgattgcgacgctgccgtccagcgtgggcaacagagcaagaccccgtctcttattaaaaaacaaacaaacaaaaaaacactgcggtgtgtatgacgcgtgcgcgtttccccgagcgcaggaatacgagaaggccttaaagtacgtccgcgggttgctgcagacagagccccagaacaaccaggccaaggaactggagcggctcattgacaaggccatgaagaaaggtgacagcctcggcccctttgttcagccccgctcttccccacgcctgggcactttggtctctctgtaaatgaacccctccaggcagcccctcagccccaccccttccagttcttagagccccttgccctgcgactccaggtaggggtgtgcctctgttgaggggcagggctggcggaaggggacggtcagggtttccgcaggggccgggctcctgacactgtccctttccttccccagatggactcgtgggcatggccatcgtgggaggcatggccctgggtgtggcgggactggccggactcatcggacttgctgtgtccaagtccaaatcctgaaggagacgcgggagcccacggagaacgctccaggagggcctgtccatcctcgctgtcctttccctgttctccccctgccccccgtctctatcctctgtggccttcagctaatttctgctcccctgagattcgtccttcagccccatcatgtgctttgggatgagtgtaaataaaacggggctgtggcttgggaacccccgtgtctgcgttgaggggaggggtgggttctgaacgctgggcacagggggcggagacgtcactcctggtcctctcctgcccctgccctccaggttggcacggggttctttgtccaccccgcagcccagagcccacacccttccttcctccctttcctgaagccatgtccttgagagtgccgggcagctcggagacatggggcttttccatggtcccagagtcctgggagaaggcagtgacctgagcatgggcgggcagaacttcggggccaggccgggcttcaggcctgcattctcctctgacccactcagctacttctgtggagttttccacagcaggcccccttggcttcctcctccccaccctcccctccctttgtcttcctgtggcctccccttcctcctacctcctcctctgggggagggggagcccagtaggggaaggaatcctgcatctggcatggagtaggcgggggtcccgggagaggtcagagcccagggagccccagctctcgcctgtgggctggaaggtcaggactcagccccacctagccagcttcgccccctcgtgccaggctcggcatgggcctgttttgcttcaccgcatacctctcgttccacagcccaggccagcacaggagtagggaggagacacctgaggggaggccggagaagcccagcagggccgtggggccagggaggtgcgcagccagcgctgatggcccccagggacagagccctagggaaccggagcaggagatgagagtgtctgctctgggacaggtgctctgcactggctcgggatggggaccagaggctgctaatccatcatcattaacgaatagagtgggtgacagtccctgataactgggaacaggttgcagagcttagccacaggatcacgctccaggctgttggccagcaggaccaggctcgatgctgagtcaaagatcaacttaggaggaaatttgagttttgggtgagagcgactccctggtggcctcagccctgtgacactcacatccaggacagttcccggtgccaagcgctggttatgtgtggggggcttgactccctggtcccaacgaggtctcagtgtgttgcccaggctggtcttgaactcctgagttcaagcaatcgtctcagcccagcctcccaaagtggtaggattacaggcgagagccactgcgcccggcccctggtcccagttctcaccacagcccctgcagtaagcagtcgggtatgtcactgacagagcagaagctcaggggactaaaactccccgcctgagttccctggtgaatggatggtggggccgagttccattccaggctggatggagcccagagctgtgggtctcctaccctcccatcccctcattccagcttgatcttccttaagagactcatacgccccaaccccttggtctgagtatcttagattgttctcgtggttcctccgtccttcaccactgaaggctgctgttcattctctctccgtctctgtcccttattgctctcacgtctgtctctgtcatcttttcactccttgtccctcttactccgttctttggcccccaatgaaagctgagtcagagacagacgcttcccctcagttcccagtgcctcccttgggggcccctccttggctgtatccgtcagtggctccagggtaagtctgccccccccaccctcgtggggcggggagcccggggcagcccagaggctggggggagggggtggacttttggcccgtttcggttattccctccatctcgtcaacagctgccgcgcgcaggcttagctcattcctctgacctgccaggaagcagagagacccacagagcaggagggaggcagaaagtggagacggacctgagcccgaggaagaggcaggcagaggctgaggctgattccaccccagcctgcctggacaaccctccttagccgcagccccttccagttccctaggggttctgcccctccccctctctggggcaccagccccccagggtcctgcatcccaccatgtcgatggctgtggaaacctttggcttcttcatggcaactgtggggctgctgatgctgggggtgactctgccaaacagctactggcgagtgtccactgtgcacgggaacgtcatcaccaccaacaccatcttcgagaacctctggtttagctgtgccaccgactccctgggcgtctacaactgctgggagttcccgtccatgctggccctctctggtatggggtggggagcgctccagggagagagggcggcggggaagctgcagagaccccaggggagggcgggtacttccgtgaggatgcagggagccctgaattaagctctgcgggtctgagttcccgcagccaggagtgctgggggcggcccatgcctagaactggagtgaagaccttgccacacgtggccccctgcgctagtgtggcgcttttagctgttacaggtgcaggcaccagaatcagaccccctttcccagccctgtgctgtgggcaaatgatgaaaccagcttcatctcccacctgtagggttagggtgagagtcccagttcacaggtgactgagaaagtgcagaatgttagcgtgatgttaacacacataggcactcagtacggttgagcatgttttgggggtgggattgctggggtgggcagggggaggaggccccatcttggattcttagaggttgatcaacttccaggctccacagactccccagcctcactgtcggggggcactggtctccttgtccggctgatgtctataaagggcccctgtgaagggaggcgtcttgcaagttgcaggttgagcgtccgctgtaaggaggcggtgtgtgtgcaggtgtgtggggcttccaggacagtgtctttctggggtcttagagggctggagccaacagctctttgggcccagggcagttctttctgtggctgcggcaccttcccgctccctgctccccgctaagatgaggccgccccattgtttctccggggcagtctcccttccgtctgccctatgccagagactgagcgctggcgaccgtgaactgtgtgtggtgccgctgcacgccctcctgggtccttcagggccagtccactcaccaggcaccgtgtggcagggaaggagccgagggcgacactggctgtgaagcggggcttgagagctcacccccggggatgttggagctgctctgagcagttagggggcctgggtgggtctcctgtgcccccactactcccagcccctcctgaggcagcggcagaggcttcctgttttcatccatctctctaggactgactgtatgcagggccggcgggccccccccccaaaaaaaaccctataaaagctgagtacaacttgggccagaaccccagagttctgagtgtccagaagggacactggaggcagcccctacacccacttcccagacacatcatgctgtgaggagggggctctgctgtgagcctgcacacctgagaggggcacccctggcaactgcatgaaagatggtgccagagtccccagggcacaggggtagagggtgaccaggttccgggccttgggctaggtgcttctgcctacatttttccacagtggggaagtagggggaaacttttacagaagcaaggtgcagcaccccaccctgaatcacacaggcaggagaggggagccggcattcagactccacggctggggtggtcctgggagagggacctgactgcgtctcccaaccgtgcaccccagcccctggccacgcagcccatgtgcccctgggctcttccataatctctccattgactgctagagccacctggggactcagactcgtgtcagccccagagggagtggctgggaggaagaaagtgctcccagagaactttgtccctcctgcctaccccccgactctgcaccctgcatctcctggcagggacccagcctttccccttcagcaccaacagttatgccccacccgggaaaggggtgcaaggtccttggaatgcttggcaactatcaaagacagagaagggaggagaagggggaagcaagagggagcccgcagcctccagctctgagaaaagggaaactgaggcactgaaagactgagctagactgacctggatcggtcctgggcccaggattccacctaggtcagaaactccaccgggtgtggtggtccacacctgtaacctgagctactcaggaggctgaggcaggaggatcgcctgcatccaggagttcaatcaaggctacagtgatgagctgtagtggcgccactgtcctctggcctgggcgacaaagcaagaccctgtctctaaaactgccctaggccctctgctgtacagcaccgctgccccctacctgttactccaggaagaaaccaaggtcaaaatgtccagcactgggctaggacagtgaaggacttggagtggaatcagacgtggggaaggcgacagcgatgcttagctgtggtttctgtatacccagcaacgtgagagcaacctgatagggcagttgttctcagccgggcgactttgcacaatgattgtcacagcttgtggggagggggttgctactggcaccccgtgggtagaggtcagggaggcttctgaacatcccacagtacacaggacggcccccagaatagagttgcccagctcaggtgtcaagagtgcccaggagaaagcctgtaatccaggcacaagcaaagcgtgccaggtgcatgggaggagtggggagcagggtgggaggggcccagatgcctaaggagggaagggtgactgcaactgggtaggctggaggagcccaggggaaggagaggatgtggggactgttaggtacaagagagcaagaaggtgaggggggcctggcacagtggctcatgcctgtaatcccagcacttcaggaggccgaggcaagcagatcatttggggtcaggagttcgagaccagcctggacaacatggtgaaaccctgtctctactaaaaacagaaaaattagccgggcgtggtggtgcgtgtctgtaatcccagctactggggaggctgaggcaggagaatcacttgaacctgggatggtgaggggctgttgggctggctccgtcgcagaggggagatgggaaaggctgacaactgtgcccacccccagggtatattcaggcctgccgggcactcatgatcaccgccatcctcctgggcttcctcggcctcttgctaggcatagcgggcctgcgctgcaccaacattgggggcctggagctctccaggaaagccaagctggcggccaccgcaggggccctccacattctggccggtaactgggggaaggtgatggggcgggggtccccctcaaccgcagacttcaggctgctttgtcctcatctaatctcctctccaattcccactcctcatgctcacctcccctaccctgctgcatggacacctgctcacccctgcctcatctgtactccccagatctcctggctgcaaatcagcccatcggcagtgtttcttgagctcccagtaggggctggccacggccaggtgtgggagggacttcgaagataagagtgagcggctgcctccgggagcttacatcctagctggggagcagagttagggtgcacgctatggcgcacacacacagtgcacgtccacagtgccataccacggggcatggtggctcatgcctgtaatcccagcactttggtaggctgaggtgggtggattacttgaggtcaggagttcaaaaccagcctggccaacatggtgaaaccctgtctctactaaaaataccaaaaaaaaaaaaaaaaaaaaaaaaaaaaaattagccaggcgtggtggcaggcacctgtagtcccactgacttggaggctgaggcaggagaatcacctgaacctgggaggcagaagttgtagtaagccaagattgtgccactgcattccagcctgggtgaaagagtgagactgtcaaaaaaaaaatggccaaggcaggagaactgccttgagcccaggagttccagactagcctgggcagcatagtgagaacccgtctcagcaaaaaacaaaaacaatgccatctggccattgcttttcaatttgcagaacatttctgtacccattgcctcacaataagcctttgaggtagggtgggtattgcttgttttccagaggtaaaacaggcccagaaaggtcaggtggcttgcaagaggacaagcccccagtgagtagggtggtgctagcccgggggtctgcctggcttcaggaaaggacgaccctggactcccatggcccagctgggttttcaaggtttcaagggtgggcgggatttggatggggctccatctgggtgaggagatgatgggatgaaggccctagaggtgggcatgaactaggtagatctgggaccaaagagagaagaggcaggaggaggttgaggtagtgtgagatgagctgggtgggctggacttggggcctaagggctaccctgagaagttgaccccaggaaggaggaaggcttataaactggggtggggagaaaggaattgagtgaaattgctgctctgggacttggtgcccccgtcctactctgggcagcccctgcctgcctctcccctaagccccctcccccactatccctccccctggactggactggggtcgtcctccggtccccaggtatctgcgggatggtggccatctcctggtacgccttcaacatcacccgggacttcttcgaccccttgtaccccggaaccaagtgagtgaggaagccccccaccccccgccctcggggcagcgggtgggactcagccctgccccccggctggcgtctcacttgtcccccgcccccgcgccgcccttgtgcgcaggtacgagctgggccccgccctctacctggggtggagcgcctcactgatctccatcctgggtggcctctgcctctgctccgcctgctgctgcggctctgacgaggacccagccgccaggtgagcagggtgaggcgcaggctggggccgggcgggattggagagaggagggccgcgcccccgctctgaccccgggccctccccgcagcgcccggcggccctaccaggctccagtgtccgtgatgcccgtcgccacctcggaccaagaaggcgacagcagctttggcaaatacggcagaaacgcctacgtgtagcagctctggcccgtgggccccgctgtcttcccactgccccaaggagaggggacctggccggggcccattcccctatagtaacctcaggggccggccacgccccgctcccgtagccccgccccggccacggccccgtgtcttgcactctcatggcccctccaggccaagaactgctcttgggaagtcgcatatctcccctctgaggctggatccctcatcttctgaccctgggttctgggctgtgaaggggacggtgtccccgcacgtttgtattgtgtataaatacattcattaataaatgcatattgtgaccgttca

SEQ ID NO: 10218 - DNA, 1745 bp, Homo sapiens
tacagactacggatctcttcattggcacacaactgagccacctgagtaaatcactctcccttcatcccttgttgacattcagcaaatcctgatggtgcttctgccatgcaccaggcctctaccaagggctgcagcaaatataaacatgactgtggttcaggctgccccccaaaaaggagcctcctaatagaaggagtgcccccttcatcttcctgtgtcccctgccctgccagtgtttgcctcccgtcttcagtcctgttttcagtcacctgcttcatatcgtgtccatcttttttattttttatttttttagagatggagtttcgctctcgttacccaggttgaagtgcagtgatgggatctcggctcactgcagcctccaccacctgggttcaagcgattctcctgcctcagcctcccaagtaactgggattacaggcacccaccaccatacccggctaattttttttgtgtgcatatatatatatatatattttttttttaattaaaaagtaaactttaatgttgaaaatgcaaacttggggagggcagaaagatcacatacaaggctgtcacttcacacttggaaggttgcacagcggctgggcagaggtgcattttttgtatttttagtaaagatgggatttcatcatgttggccaggctggtctcgaactcctgacctcaggtgatccacccgctttggcctcccaaactgctgggaatacaggcgtgagccactgcactcagccctagtgtcctttgtgccaccccaaggcccaggcaaaattaggtgctgtatacttctctgaatgaacatgaagttttccccttgaggcttatgctagtgggcagccagttccccaacctggggattctctcaaggcttacagagcttactgtatcagtcatttcaaccatccacgccaaatagggaagaataactcttgtctttctaactcacgagactattatgaggagaaaaatattagaggcttggctgggcacggtggctcacgcctgtaatcccagcactttgggaggccgaggcagtctgatcacctgaggtcaagagtttcagaccagcctagctgacatggtaaaaccccatctctgctaaaaatacaaaaattagctgggtgtgatggccggcgcctgtaatcccagctacttgggaggctgaagcaagagaatcgcttgaacccaggaggcggaggttgcagtgagccgagattgtgccactgcgctccagcctgggtgacagagcgagaaactgtctcggaaaaaaaaaacaaaaaacaaaaaacaacctgggtgtggtggtgcacacctgtagtcccagcttcttgggagactaaggcaggaggattacaggagctcaggaggtcaaggctgcagtaagctctgattgtgccgctgcatgcactccagcctgggccacagaatgagaccctgtctctaaaaaataataaaaattaaaggggctttgcaaacgcggaaggtgtctggatgattatcccctgcatgtgcagtgccttgtttacaattaatttgctttttccgtgtttattcaacaaatatttattgagccctcactctctgccaagccctgtgctagatgctggataagcaaggtaagtctctgccctcaaggaacttacactccaatgtgactcaaggggaaaagaatttgaaagttgctacttacccagtcccctcactgcacagaaactgaagccagaggtg

SEQ ID NO: 10219 - DNA, 15306 bp, Homo sapiens
ggtgctttagtctgaagatggcggcctcagcagcgagaggtgctgcggcgctgcgtagaagtatcaatcagccggttgcttttgtgagaagaattccttggactgcggcgtcgagtgagtgatggagatgtgggagtagtggaatttttaggtccaagtgatcctcaaagcttctgctttttgcagggtacttaagtcagcgtggtggctgaattaggagactgctcctgagcatgcaagtgagcagaaagaaattttgtttgcagttaaccgtttagggatgtcccttgagcttttggggtcacgaatgcaccggctcttgcctttaggagtgatttggtgtaaagatttattacttggtaaccaagatttacaatttagaagggataattttgactgtagtgtggaggatggattcaaggtggcaagattgtaggcgtgcagaggagctaaaaggcaatttcattaatttacttaaaacgtgaggacctgaattagggcgatggtagaaggatggtggtcagatgcattaatgttttaaaagcaaattagatgccgtttcgtgatggcttaagtgggagaagtgtacggaataaaggaaagggagaaatgatttctgggtttttagcattggtgaattgtttgtttagaagttaggagcaggccaagagaagatgagtaaagtttgaatgtgttgactttgagaaacttgtgaggtttccgtcaggcaattggacaaaggttgtatatcattgtggctgagaagtggactccgaagctagaccgttggggttagaattccaacttggccatttaatcgttgttatcacttgaataactgaagttagtatgggaaaagggctcacaactgggcctcagtttactcatcgataaaatggagtcaataatacccaactcataggattgttgagaggattgagtttatatgcaaacttcttagacttgtgttagatacagtgtaagtactcagcaaatgatagttattttcacggtaactaaaattgaaacttacgggagaggcctagtctacagataaaggttggaataattagttctgaaatctttcaccaccttcaatttttgtcagctgcagttttgagatgaggtttttatatttgcttaccaacatgtaaacattcgtggtcactctttttgtagatattcatgtttcaggtcaacccctggaaacaaaatggagcaagatttagtttcttctaagtttttagtggctcagatgtgagtagtagaatgggaaataggttggtttgtgccccgtgttttaaacatgtggttggtgaagaccaagcccagtaaagtctcccgtagtccctgtgaaactttatggaaaggctgaggagtttcattagcatcttgcggatgcaagtttccagacaataaagggctagtttaaaacccttaaaaagagtcagcattatgtacagcttcgaaacagtttctctttgttgttccattgattcagcaaatatttatttgagtatctattctgtggtaggcattgttcttggtgcttgcagctgtttttccttcaccattttaggcaatttaggaagagggttaccttccagagctggtttgttttgaaatcagtgtcttctaggactttaattatctggtataaaacatatgtttaacattattttgttctccagtatcatattctgtgagaccttgatcttgccagttggtttgacttaaccattagagcccttcaaaatttagtctctgtggattgttggaaggattagtggacttttacttattcatttagccaatattgaggccctgctgtttattggtcactgtaaacatagtggtttatatgctgagggagcttacaattagtggtggggatgaagagacttagaacaaatataggcaattgttgaaccagtgaggttttggtgaactaggagaactaaatagatattataaaaagtaaatcagtgaagtacaagcactgtagttcagaagagaaacagatcgtgtagtttttagtctttaagattatatactctaaatctttgaagtctcacagggctggtacattgtcttgtactgtgataggagcccaataaagtaatactcagtggatgtacttggtttgggtcttgaaggatagttatagtgttacaagttagccagggggagataggattaccaacatatggaggggagagaacaacatatgcaaagagggtaacccgcaggacagataaagataattcaattagttgtactagagagtaactaggggctagcagtgggaaataaggcaggaagggtaggtgagggcaactcaacacattttactaaattgtgaaagaccagtaagttgggattttatttggaaatcttcagtataccgggaaacacactggattgtaatttgtctttttcttcattgtgatctgctcacagggatcatagtccacatagcacagtaactggtatgaaaacactcgatatttgctgaggatggagactgcagccaactcaacaacttctctgtccatctcaccaccaagtctggtacattatggctttatagtcagtaccatagctgcttcctaaatcttaagcctttaaggaaatgcaaagtagttcctgtccacaagaaatctggtgaccctgtctttctacagtctaagatagagaatccaaaatatagtaactacttttaatgttttcttctgccacacaggtcagctgaaagaacactttgcacagttcggccatgtcagaaggtgcattttaccttttgtaagtattaaggaaaagtaggtgggaggtggggatggctaatgggtacaaaaaaaatagaatgaataagacctatttgatagtacaacagggtgactatggtcaataataattgtacattttaaaataactcagagtgtaattggattatttgtaactcaaaggataaatgcctgaggggatggataccccataagtcaaaggataaatgcttgaggggatagataccccatgctccatgatgtgcttaatttacattgcatgcctatatcaaaacatctcatgtactccataataaatatacatatttatatatataaatatataaatatatacacctaataatatataaatatatataaatatatacccaaataaatatatacacctactatacactcacaaaaattgttcaaaaaaaagcttaaagtgttttaaaaaattcttatcttgcaacagggtctcgctctgtccccctgcaggggtgcagtggcctgatctcactgcagcctctgcctcccaggcttaagtgatcttcctgccttggcctcctgagtagctgggactatagacatgtgccaccatgcccagctaacttttttggtattttttagtggagacagggtttcgccatactgtccagactggaaaatttttttaattttcattttctttaagagacagggtcttgttctgtcaccccaggtggagtgcagtgatgcagtcatggctcactgcaacctctgcctcccaggcttaggtgatcctcccacctcagcctcctgagtagctgggactacaggcatgcaccaccacacctgggtaatttttgtattttttgtagagatggggtttcgccatgttgcttatgctggtctcgtcgaactcctgggctcaagctatccgcacacctcggcctcccaaaatgttgagattacaggtgtgagccactgtgctggcttatttttgtggagatgggggtcttgccatgttgcccaggctgatcttgaactcctggcttcaagcaatcctcctgcattggcctcccaaagtgctgggattacaggcgtgagccactgtgcccggcctacagtctttattgattacattttgagtgatacttgattaaaaagtgaaaaagctttatcataggtatttgtgttagtttttttattgttgtataacaaaataccacaagcataatggctcaaaaacaacacatctctcacagctgagcacagtttagctgggtcctctccttaggatctcacatagctatatattccaggtgtcagctggggctgtggtgtgtctcatcaaagggtcaactggggaaaaagactgacttgcaagctccctcatgtggttggcaaaattcctttttttttttttttttgagatggagtctttctcccttgcctaagctggagttgcagtggtgcagtctcagcttactgcaacctctgcctcctgggttcaagccattctcctgcctcagcctcctgagtagctgggactacaggcatgcgccaccacgaccggctaatttttttttttttttttttgagacggagtctcactctgtggcctaggctggagtgcagtggcgcgatctcggctcaccacaagctctgcctcctgggttcacgccattctcctgcctcagcctcctgagtagctgggactacaggcgcccgccactacgctcggctaattttttgtatttttagtagagatggagtttcgctatgttggccaggctggtctcgaactcctgacctcaagtgacccgcccgcctgggcttcccaaaatgctgggattacaggtgtgagccttcatgcccggccataattcatctttaattgtaggactgaggtctgttttcttgttgacctttggctctgagttgggagctgctctcacctaggaactccctgcagttccttgttaactagtttatctgtaggctgtcttacaatatggcagcttgcttctttaaagccagcaagggcttctccagtctgcttaagatggcatcttatacagaacataatcacaggagtgacatcccattacttttgctgtattcttttggttagaagcaagtcaggtttctcctacacccaaggaggggaggagattatatagggtgtaacatggggaatgcatggagatcatggggcccatcttagaattctgcctactacagtattctaataaggacttgagatttctaataattggcagaggatattttaagttttatcttcattgagtaccattttcttttttagatttataactaataaaacaatatttttatattaattacatttcctttgctttcttgtgagggtttagaaatcagcctataaatttatcctgggctgtatttttctgtgggcttttttagggtgtgatgtgagtacatagagttcacacacacttcactgaaacccttttttccttgcagcactgtaagggctgtggtaaaataacaacataaaggaacttaaattcttaattcttggtttaatgttacttgactcccaaagactaacagattagttatatatagtgccggtgaaggtgtagggaatctggcactcaagttgttgagaagttcaactggtaccttcagttctgttgtgtagttggcaaaataccaaagttaagaatttatatttgctttgatctagcggttacttttctaagaatttatcctacagaaatgtgtggtcaagaatattccaaagcagcattatttaatgtcaagtaagaagaagaaacttaaatgttcatcactgggattgattagatattaagtcactgatgcaatggaattttatatagttgaatagaaaagttgggcacatgtattatggacatgaaatattttctgtaagtttgaaaacttcaattttttcaagagcatttaaataaaaagttccttgcaaaaaaatgaatagatttttattggtccataaataaaataggacctgcaaagaatagatcttagatttaaataaaaggcggctttgatgttggtaaaacaaaataaaatatgacaaaaaaaatatttttttgttccattcattgtactctagttggaaatcctggttccttttttgagacaggttctctcactcaggctggagtgcagtggcacaatcaagttcactgcaggcttgaactcctgggttcaagggatccttctgcctctgcctcctgagtagctgggattagtcgtgtgccaccacacctgactaattttttgtactctttgtagaaatggggcttcaccatattgcccaggctggtctcgagctcccgcactcaagcagtctactcacctcagctcccaaagtgctgtgattacaggcatgagccaccacacctggactgagttattttttttgagacagccttgctctgtcgcccaggctggagtgcagaggcgtgatctcagctcactgcaatcgctgcctcccgggttcaagtgatcccccttcctcagtcacccagatagctgggactacaggcatgggccaccacacccagctaatttttgtatttttagtagagatggagtttcaccatgttggccaggctggtcccaaactcctgacctcaagccatccatccacctcagcctcccaaagggctgggattgagccactgcacctggcctatgttttaatataaacaaatttcttaatgcctttgactgtggaagtggtcacatgacaataaaggaatgctttagaaattgttgtatctacaatgaatggatcattgggacatcaccagaaactttccgtcttctaggttaatccttataaagttatccttgaagtagaggagcaattgtaagattttgttttttttggcaaagcacagcatgacttgaatgagactaatgaggaccagtttgtcatctacagggactagacatcttaatatctgttttctgttgaagggctggaggggcagggtacatccaagcactctagaatctgttttccgtatgcgatgtataggttgaaacttttgcacaagggaaaatagcaaaattgtttaaattaaccagaagtctgtaactaggttgagtaagggctaaatattatcttttcttgtttttcattaggaacacgtgatgatagtcgtggtggtggtgagggtgactggattcagaaatgagtgcaacaaggctttgaggcttaattttctagtttctagaaacgaagcttagaacaagagtactgatcaaaatttcccttagctattactgttagtatggtttgcatctagaatgacacagaaagctcatgacccgtatcttctctaatggcagcaaggaaaacaggaagcttaacaacacagggatttagccttgggtaatcaggaagggtgtaaagcaaggttactgacacttataaatgtctgtgatccgattttcggctgggcatggtggcttatgcctgtaatttcagcactttgggaggcccagatgggaagattgcttgagcccaggagtttgagaccggcctgggtaagatgggaagaccccatctctgcaaaaaatataaaaagaggcagacatggtggtatgtacctgtgatcccagctactgaagaggctgaggtgggaggattgcttgaacccaggaagttgaggctgcagtgagttgcgttcataccactgcaccccagcctgggtgacagagcaagaccctgcctaaaaataaaataaaattaaattaaaaagtccgatttttggcagatgaaaaagttggtagtttgatttggaactcatggaaactttctgaagttcatgattaatcttttcctatattttgaatttttaggacaaggagactggctttcacagaggtttgggttgggttcagttttcttcagaagaaggacttcggaatgcactacaacaggaaaatcatattatagatggagtaaaggtaaatttatttctatgccagatacatacatgatatacatgtaggtactatttaattatgtatcaattaaatagatcataaatgtggaatgatggggacttggagagatttgtaactgaagctgccttaatgcttgttaagaatggtggggtggaggctgggcacggtggctcacgcctgtaatcccagcactttgggaggccgaggcgggcggatcacgaggtcaggagatcgagaccatcctggctaacacggtgaaaccccgtctctactaaaaatacaaaaaattagcctggcaaggtggcgggcgcctgtagtcccagctactcgggaggctgaggcaggagaatggcgtgaaccccagggggtggagcctgcagtgagccgagattgcgccactgcactccagcctgggcgatagcgagactccatctcaaacaaacaaacaaaccaacaacaaaaaaagaatggtgcggtggtaggccaggcgcagtggttcatgcctataatcccagcactttgggaggccgaggcgggggggatcaccagaggtcaggagtttgagaccagcctgaccaacatggagaaaccccatctctactaaaaatacaaaaaaaattagatgggcgtggtggcacatgcctgtagtcccagctactcaggagactgaggcaggagaacccaagagacagaggttgcagtgaactaaaatcgcgccattgcactccagcctcggcaacaagagcaaaactccatctcaaaaaaaaaaaaaaaaaaaatggggggtggtagagtgcccagttttaaaaggtccaggaaagtacaagatgaccctttaatgggtagcaagatatgtaacacagtggacataacagtctacttttcttttttctttttgagagtcttgctcttgttgcccaggctagagtgcaatggtgcaatcttggatcactgcaacctccgcctcctgggttcaagcgattctcctgcctcaacctcccgagtagctgggattacaggcatgcgccaccacgcactgctaattttttttgtatttttagtagagattgggtttcatcatgttggtcaggctggtctcaaactcctgacctcaggcaatccgcccacctcggcctcccaaagtgctgggattacaggcgtgagccacagcgcctggccagcagtctgcttttcaggtcaggcaagctggggctgaaatcttggcttacccaccatgtgatcctgggccaaactgatttactattttattttaaattttagttttaatgagacagggccttgctatgttgcagggtggtgttgaactcctggcctcaagcaatcctcttgcctcagcttgccaaaatgctggcattacaggcctgagccactgcccctggtctgatttacaatttttaattgagggttagggagtcataataccaacaaagatggtaaaaggaatttgaggagaaaatgaaagaacaagggacaaataaaaactgcctgggttattcattattcatactgactccctaataaagtgattttcagtttgaatgtttttgcagacattgcctttcctcccttacagtgcttatttttttaaggtccaggttcacactagaaggccaaaacttccgcaaacatctgatgatgaaaagaaagatttttgagactgcagcctattaataaagttaacataactgagaattttgtctaaatgtttttatttgaaacaaatagttgcaccaagcaagaggttactttgcccactccaaattaaaacagagcacaataggggcaaaatttatttggcaggacagttccagtatgtgaacatcttcctcctcactgtggttggggtaactttactcatatgcagctgttcttacacaaaacattaaccccaaactactagtgtcacataaaagtaagtggtcttgactttgtatgtggggcagcatgttctataaatgctgaaaggtgggagaagcacaaacacaacccactctttaaaaaaaactaaataattcaaagtagaattttctatcccccccatttctccagtaataaaaagtagtgctgggatctggcacccagatttggtttttatcctgaccatttacaaagtgttcccccatatgacttgcatcattagggttatgggtaagagttcattcactttggagagacctgtgcctattccttcctcctcttcttgccttcatgctcgtgttccttggggcggctgctatctgagggtcttttagagccaccatgctgtttggcttcttccaaaaacttgtccaaaccaaaaggatcttcctcaaactgaactggtccttctcggcctctctgtctacggtctgaaccagaaaactccttgtcgggaacaaatctaaggaaaaggagaaaaaactatgaactactttgctttcaccagtgtaaacactgaaattgagttgtatggcttggcacctgttggtctttattctggcttctaggtcatcaccatacatgtccttgtccagatttttactgggcctataaatactctgggccatatctttaccacctctccaggcttgatcataaacattataaatttcatcttctccacctgcaaatccactgtccataccctgtggaaaaatggatgacattaaataaaagtgtaaacattgtttatcaaaagctgaatcataacatgtttacagtaaacccttgctaatgtacagctcacattttcaacaatctgaactgcaaattaaaaagtcttcattaaaaaactggtagcacatgaacttcataacaactttggattcttttttttttttttttcagacagagtctcactctgtcacccaggctggagtgcagtggtgtgatcttggctcactgcagccaccgcctcccagttccagtgatcctcctgcctccgcctcccaggtagctgggattacaggcatgtgccaccacacccagctaatttttgtatttttagtagagacagagtttcaccatgttggccaggctggtcctgaacccctgacctcaggtgatcgcctgccttggtctcacaaagtgctacatagctcactggagctgtgacctccctgtgctcaggtgttcctcccacctcagcctcccaagtagctgggagtacaggtgtgtgccaccatgtccagctaattttctgtagacagggttttgccatattgcccaggccggtcttaaactgggttcaagcaatctgcctgcctaggtctcacaaagtgctaggattacaggcgtgagccacagtgcccagccagaaatattttcatcacaatttttaaatgttttaagcttaagcttctaacaggtgattatcttgaaaatatttacttacgtgaaatttcacccctagatccctttgctcagctggtaagttgccattgtatagtggttaagaaagctttgaaattggctgggcacagtggctcacgcctgtaatcccagcactttgggaggccaaggcaggaggatcacgaggtcaggagttcaagacccgcttgacccaacgtgatgaaaccctgtctctactaaggatacaaaaattagcctggcatggtggcacatgccctgtgataatcccagctactcaggaggctgaggcaggagaatcccttgaacctgggaggtggaggttgcagtgagccgagatggcaccactgcactccagcctgggcgacagagtgggactccatatcagaaaacaaaaacaaacaaacaaaaaaaactttgaaatcaagacacccagtttgaatcttaattccatcagtcacaagctaaacctgtgtttcaatttcctcatctataacataagagataatagtattatttcataggatttttgtaagaattgagataataacaagacttagaacaatgccaagaatataaaatgcatctaataaattatcacttagaagagcttacttaaaacctccaagtcataattaagtttcccactctactttccagtagaacttacacttctgtattcttgtgtgtgcgcacgcgcccgcgtgtgttttcccaggcttaaagtgtcctagttagctaatggcaattggtactagaaatcagatttcctgacagccagcctagtactttaatcccgttttacagcttcatttttaaaagaatcccaaattgatatatttctatagcattaaaagaaaaatccaaaaatcaacaacaaaaaaacccaaaaggcacttttgtaggacactgactcttttatttttttgagatagagtctcagtcacccaggctagagtgcagtggcacaatcttggctcaccataagctgaagcaattctcgtgcctcagcctcccaagtagtggggattacaggcgtgcaccaccacacctggctagttttcgtatttttagtagagatggggtttcaccatgttggccaggctggttgtgaactcctgacctcaggtgatctgcccgcttcggcctccaaatgtgttgggattacaggcaaaagccaccatgcctggcctccctggttctattttagaaacaaaaggttgacataccacaacaccaagtttttaatcacctaatttctttcttctcctagtgtctcaaatctcagcccactataagaagttaaaatcagaactgtttcatcttgtctcaagtttcaacatacaacttccaatttttttgtcatcatgctggcatttacatccaaatgtaaagtatgttaattttcgtttccctgaggataggtattcacatcaacacacacaatatgctgttcctaaacttgtaccttggattggttgaagagcctttggtcatactgaacttcattggaagtccgaggattaggaacaccgagagcaataacttcactgatatcccgattttcatttctctgaagtttcgacctattttgaaatacgacatcactaactgaaaactctttatagacaagctgaatatgttcaatagaaatacaaccaatctcagaaacaaaggatgtgaatatgtcacattcacatcttgtgaacatatattccttgatgatacatcatcaagctggcagcccttataaagcatttcagattagagggagagttttacaattaggacgtcctgttagctcaaaagaacatctaacagattcgttgacatggaattctttaatataagcaatcaccttacaaccatgctgagatataaaattgctatggtctatatttactatcattatatgatggtttgggggttggggaagtggatacaatttagatgtagcacacgaaacattttaaataagctagaaacagctcttttatctaaccacatttagtaattttatcccactagaattttgaggaaaacatgtcaatgactgaattagtatgatttttgacattcagattaatttggtttcctggctgttgcattatatatgcaacctacatcccaatgaaaccatggtaactgtcattacttgttttactaaaaactcaggtcacaaaatgatttctataggctgtttgattttcatccagttacaatttcacagcttttctatgttgtcaattctgatagccactttactcgttttgagggcccaatttatccacagagccattgtaacttttacaacttaggaattactaaccaagactgtcattaattaaacactttcacactttgctcctccttctacatgtactttaccctcaactctcaagagtaagagtctttgcttctccatgacatcatttatccagggagatgaaatatgccaattaataccagcaggaatctttttcatgcttatttatttttatttttttattttttattttttatgacacggagtctcactctgtcgcccaggctggaatgcagtggcacgatcttggctccctgaaacctccgcctccagggttcaagtgattctcccacttcggcctctcgagtagctgggactaccggcatgtgccaccacacccagctaatttttgtatttttagtagagatggggtttcaccatgttggccaggctggtcttgaactcctgacctcaagtgattcgcgtgctttggcctgccaaagtgctgggattacaggtgtcagccactgtgcccggcctcttttttgtgtttaaaatatgacttgaaaaatgtattaggctcatgggatgatcagagcacagaaaactgttcatttgggaagaaaatattctatatttgcatttaaccctcactcagaattccaccttagtattgcagcgttccctctacttttcagaacttttagtcctcagcctttggtgagccataaacttccccaattcctactttactctatgccctcatatatatatttagtttgttctatacgtttatacttactaagagtgctttgcaaattttctcaaattattttatggatagctctgtctttctgaactgtaagttaaactactcctaaaaatgagctgattttctacttctttcaaaactgctcttctcctcaattgtactagatgcagtactatgcatataaaatgatctcaataaaagcatgaaagcttatttcctgtctaaagaggcacataatccatttatctcaccatctgaggtagaaaaagaacggactataacagtccaaatttactactacatccttttcaaaaatctgatctcgattccgttttctatattcccatcattctcaattctgacttaagtgatggaagattaattccaaagacagtcaactagagctaagacaaagtagttaagtacaagaaaattaagtgctaatttattaagttatcaaactaaagaagaaagggagagaagcaaaactgatcttagtggactaaaactctgctctaaaaggtacaaaaaggccactcttcatgattggtacatatcttttttttttttttttttttttttgtgagatggagtctcgctctgtcgcccaggctggaatgcagtggcgtgatctcggctcactgcaagctccacctcccgggttcacgccattctcctgcctcagcctgccaagtagctgggactacaggcgcctgccacgaccatgcccggctaattttttgtacttttagtagacacagggtttcatcgtgttagccaggatggtctcgatctcctgacctcgtgatccgcccgcattggcctcccaaagtgctgggattacaggggtgaaccactgcgcccggccaccatgattggtacacatcttaaataacacctacctcttatcaggagctgccctggaaagattccggtcatgctgtctctcttttcgcctgtcatgccggatttcatccctctcacgtgcctccccatcctctgtgtgaacagttgaaaagtacttcactgtaatatgtattatatgtgtgcatacgtgtacacgtgtgtatatatataattttttaaaaagagacagcatctcactctgtcacccaggctgg

SEQ ID NO: 10220 - DNA, 3593 bp, Homo sapiens
tgctctatatgcattctgctcactgacagaagacacatttagctgagatttgatcacctggcaggaaggaaacagaagttaaaggactaaatctattttgcaggtcaaccccgggaacctcaaacctccaaacacatttcttgtatgaggcaaagctaggattcttgtttaagatacagaaccttgctctattgctcaggcgagtgcagaggcatgatcatagttcactgcagcctcaagctcctgaactcaagtgatcctcctgtgttggcctcccaaagcaatgggattagaggtatatgccactgtgcctggccaaagcaaggagtattaactctggggttaatcttagctgtactgcttacttgatctgggcattttagatgagtcatttaatgtcttagagcctcagtttctcatctatatagtaacagtagagtcacccaaaattaaggcaaaatggtaataagaaaacttaagcaggctaattttggctttcaaaactactttttcctatgacatcatacctttccaacttcttatggggctgaatcatgaaaggtgcttggtgtactgaaatatcttgagtcacaaagctatttacttcagttagggctaacagtaatgcttttgagacacttgtatagagttggtatttaaacagagctataaggaacaccaagctggacagggtgagaaaatgaaaagagaaggccggtcgcagtggctcacgcctgtaatcccagcactttgggaggctgaggcaggcggatcacgaggtcaggagtccgagaccaacctggccaacatggtgaaaccccgtctctactaaaaatacaaaaattagttgggtgtagtggcgggcgcctgaaatcccagctacgagaggctggggcaccagaattgcttcaacctgggaggtgaaagttgcagtgagctgagattgtgccactgtactccagcctaggaacagagcaagactccgtctaagaaaaaaaaaaaaaaaaaaaaagagaatgaaaagagagtgctgtaaacagacagaaaaaatgttgcagtgagacactgggaatcctgtctgctaaaagtaaaagctaaaaaatcctgtttgccctcttctagatgaaatgtccaactgacgctacaacttctgcttctgttaattacttagaaatgaatttagtatttcaggggctgaagttttctttgtatgtgagtatctaatggatggctcattacattggttaagagacccactatgcagtcattgaagtcaaaacattaaaggaaaaaacctttattcttccctgaatagtaaacctagggtctgccttgccttaaaatatatgaaacaggccgagcggtggctcacacctgtaattccaacactttgggaagccaaggcaggtagatcacctgaggtcaggagtttgggtccagactggccaacatggcgaaaccccgtctctactaaaaatacaaaaattagccaggcatggtggcgcgtgcctgtagtcccagctacttgggaggctgaagcagaagaatcatttgaacctaggagatggaggttgcagtgagccaagatcacgccactgcacttcagcctgggtgacacagtgagacgctgtctcagtaaaaaaaagtatatatattatatatacacacacatatatacacacacacatatatatatatatgaaacattctctttgaaagagaatgatcttttatcttatcaacttctccaagtgtggagattcctggacaaaataccaaaagtttgctgatgtataaccagtctctataataaaagggctatatgaaaccctctgacagtactatcagctgagttttccaggtacctaggcactggtaaaacacttttaagcattttgtcatgatttctttaataggccatacttaatactgcactataattcaacacactctcagaggtgatgttagtggacctattctatcatatgctaaactgaacgacaccactgagcttttataaaaggttttctctttcctcccttgccagactgttaaccaccactttccccaccagtctcatcagctggcttgtaatagtaacttctcttaattactactttaatctgctttgagctgaggaactaaacacccaagctttcatgtactcaacacatactgtacttagtactgttttaggtcctgtactagacacataatggctcattccctgatggctgacattctaaaaagcatgtacatattatggtaaaatgtaggtaaaaggagctgaatgagagtctgaagcgctctggagagaaaaagtatattattattggggtgtggactttctgtattttgacaactctaagaccactttttttccctaacaaatgaaggtgctgaaaagctgagctcaagtatgcaatcattaacacttaatactgtagcatcccaattttatcagagctgttaggaagcttggaaagaatgcctcatctagacatctgtggacaacaccaagagcaaattaagggactgcatatcctcaacgttaaagtggattgtaaagaaagaaaatataaattggactacagttttggttccccgttttccctcttgcctgttatgttcccttaaaaaaataatttttaaaaaatctatttacttgagaacaggttatgagactggctaattttttgtatttttggcggaaacgggggtcttgccatgccccaggctggtctcgaacccctgggttcaagcgatccacccgcctcggcctccgaagtgcgggattacaggcttgagccaccgctcccggactgtgttccccttcttaatctccatggggaaaagctgagagagagaacggtgcctgtattccatatatacttgtttgccatttattttcaacacggagggattctcagaatccttcaatgacctccttctaaaagagccagaggagaagacagggactagttttacgcacagtggcttaacaaacagcgccgcatccctgtcagttctgggattcctcgggagtggttttttttaagctgcagaagtctaccctaccgtctacaaagacgttctatggggttttacaaaaacccaaacagaaatgtgaggagacagttacagtaagaaataaacacggattcccaggctcttttgactgagcgcccccgccaggaatggccgcctaaagaaacaggcatctcaacgctttattgctaagtgtgacggttagtggggagttcgactctgcagccaaaggaggtcaggaatcgttcaataacaatcggtctggaggtgaaaagaggcgaagaagacacgtaagtccctccaagacgcggggcaaagcgatggagagacgcgcgccactcctctctctgtaccttttgggcaccaggacccttgccacgggctgcgtgggccgccgagaagtcgatgaccccttccaggtctgcggtcccgggccggctctgacggtagaagcggaaaagtttccgaaaggcgtcctccccgggctcagtcgccagagtcgccacagagcccacggccgctgccatcttccccatctcgcggcc

SEQ ID NO: 10221 - DNA, 495 bp, Homo sapiens
tttttagtagagatggagtttcaccaagctagtctcaaactcctgacctcaagtgatctgccgcacccagccaatattctgaacaagagaatattttttaaccttagaaaattccaaacttctttgtagtcacactcagccttttaaaccttacttgcaattaatttaagtctaataaatgatattagtttaatttttgaatgtgaattctagaatcaagcatgcggctaaaatatttaagggtaaaatgtattgctgtcttcaacttacttagaaatgcaatgcagtaaatcggacagacagatggacagaaagatgggcaaatatgtgataaagcaaatttatcaatgttaattgcttttaaaatttatttttgatatataatcattatacatatttatggggtatatatatttgatacatgaacaaaatgtgtaataatcaaatcagggtaattaggatatccatcacctcaaacatttgtttgtgttggga

SEQ ID NO: 10222 - DNA, 1260 bp, Homo sapiens
atcaatcttgtttgtgacctgaaactactgaggggcctactaagcctgcatttacttagaacaaatagtgttaattgaccagctttattatcttatgacaacaaggagtttacaaagctagtgaaaaaatggaatgtattagactaaaaatggtttgcagatctcttggttttaatatagctacttataatgctttaactgtattttgaagtgaacaattccttttaaccccatttttaattgtccttcaaagaggacctgccttatatatgctttaaaaaatactccttaattttagtacagcagaatttttggtaaagaggtatgttttgaagcaatttggtttaaatatgaatgtatttcacttgttcctgttttgttgaaagggcctaatgcaaataataccaagaaacccactgtctgtgcaatattccaataacatttacatagggcaaataaaatacttgaaagaattctgaaacaattgtacctggggtggatggcctctcagggtttcttctggctttatgacttcatagtttaaagaactttttttttaagtagttacatcagatgcaggtactccattagttagggctgcactctgaaaattcaaattattattatgagctcttaaatactatttaactctggaagagatatgccagaataaagccaaaagaccatcacccctataatggagaaattgatctgcctattcttttcaaagcctatcttactaatgtttggatcttttaaaatcatcttatcatcagtataattcttgagtatgttaggtccttctttaaggataaaattgcacaagcacaggacaccatgatttgtgtgtatatatatatatatcctagtgtgttcagctttaagctttgcaatcccttaggacactgatgtgggatgaatggattcgctaggcccacacagtaactcacctgtagacctgctgaacctcagcatgtatgacagttcacacaggttaatactgaatgtaaacgaaaaactagaagacaattgttataattttttttggctgtaatttatgcaattgctttttgtgatttttagaaaatggggcacccgtgttattactgtaaaatgttcttaaccaaaatttggtgaatttcactagtctacctcacattttgttaatgattcaaaattgtcttgtgtctactgttatatttttgtcctttgatttaatttgcttaatgtattaaagttatctcccaccccctccaaaaa

SEQ ID NO: 10223 - DNA, 1260 bp, Homo sapiens; identical to SEQ ID NO: 10222

SEQ ID NO: 10224 - DNA, 1260 bp, Homo sapiens; identical to SEQ ID NO: 10222

SEQ ID NO: 10225 - DNA, 535 bp, Homo sapiens
tgccattggtgtggaatcaattgaagattaacgtttgaggcctgaaccctcagtttctcttcagatctgtactttggtacagtattactcaggggtttgaaatgatagaatgtagacgatatttgtatttaaaaaaagaagtagctttgtctttctctgtgcagtgttagtttaagatttataatcttctatgtattgaaacttttggcaaaatttccacaggagttagaagtttactatttaaactgaacaaacaaatcagtaaatgcagagcaggcattgtgtgcatttatgcatcttctcctagcctaattcctttgctttacccactctttaaatgtgtttccagtctttaagaatatcttatctatgagactatggaacagtgattaatcttttgcaagaacttaagtcagttaagaagctttcagcaggtaacctgcacccaccgtttggttggaattaagcagttggcaccagcaaacctaaatgtcaggctgaggttctgttgcagagtgaaactagtttgtttcct

SEQ ID NO: 10226 - DNA, 535 bp, Homo sapiens; identical to SEQ ID NO: 10225

SEQ ID NO: 10227 - DNA, 535 bp, Homo sapiens; identical to SEQ ID NO: 10225

SEQ ID NO: 10228 - DNA, 219 bp, Homo sapiens
tttttttttttgaaacagagtcttgccctgttacccaggttggagtgcagtggcgcgatctcagctcactgcaacctccgcctcccgggctcaagcaattctcctgcctcagcctcctgagtagctgggattacaggcacgtgccaccacgcccggctaatttttgtatttttagtagagatggggtttcaccatgttggtcaggctggtctcgaactc

SEQ ID NO: 10229 - DNA, 147 bp, Homo sapiens
tttttatttttattttttgagatggagtctcactctgtcacccaggctggagtgcagtggcacgatctcagctcactgcaacctccgcctcccgggttcaagcgattctcctgcctcagcctcctgagtagctgggcttacaggcgt

SEQ ID NO: 10230 - DNA, 27118 bp, Homo sapiens
cggcggccgaggcgatgagggtgttggtgcggcgctgttggggtcctccgctggctcatggcgccaggcgtgggaggccgagtccccagtggcgagcactggcccgactcggctgggaggactgccgggactccagagtccgcgagaagcctccctggcgggtgctcttcttcggcacggaccagttcgcccgcgaggcgctgcgggcgctgcacgccgccaggtacccgggccagggatccggggacccggccgctgaaggcctccaggccgcgcccgggcggccggccccgagggttttggacttctggttgcggaaagcatgggcggcagagcggtgtgggcccagatctcggcgtcttctggctcccagaaggtgcgccattcccgccggtcagcctttgggcgcctagtacctgcggtctgcgcccctcactccccgccgcctctgtgggttctccaggcgccctgccacccacgctgtgccgagctggggctgggcgctctgcctgcatcccccgggccagtcccacggcctccctgcccgttttgagtgtggggaatccgtggctcagagaggttatgcgattgcccaaggtcatcagccgaggtggttcggactaaaaccaggtcccacttcaaagttccctgctttgcagttcctcctgacccccatccttcggcacacccgtgtctcgctcttttgctccccctgtgctccttgtatacaaggacatagtccaaaaacgacctgttttcaaaagaataaatttataaatcagaactgttaggtatacatttagtattcataatatttaacaagttttgtttactgggaaagaaaattatttgaaatccaaccagtcctgagagtccatggtatgtggtggcaataccgtatatacttctctgcctctttttcccaattaatgttttttatttccccattctgtttttttctgacgcagtcctccttccactttttttggtcatctccatctccttttccctacagatacttcacagcagcccctcatgtattgaatccttcgtcaatcccctgtgtggttttccttcctccacacacccctctgtgcacacacccggaaggaaaccccatgttccctttgcacacccttcatgggctgctgttgtcacatgcgtctctcactgcatttatacatttataccaacactttttttgtttgtttctgaggcgaggtctcgcgctgtcccccaggctggagtgcagtggccggctcatagctcactgcagcctcgacctcaaagatcaagcaatcatcccatctcagcttccagagtagctaggactacgggcgtgcaccaccacgcctgatttttaaattttttgtagaggcgggttttcaccatgttgcccaggcttatctcaaactcctgggatcaagtgatcctctcaccttggcctcccaaagtgctgagattacaggcctgagccatcattcctggcctatcctgatacttctgatgatgcttcacttggcagctccattactcctgtgctttctttatagtgccccaggacatactcctcataactcctcaacgtgtacatacaatacctgtttaataaatgtacccccctgggtactagaatgctatgcagcaggtagaaaggatgaggtagtgctacaggtactgccatggaatgatagccatgttatgtatttttgtttgttttttaaaaagtagtgtttgaatggcatcatggttatggtaaaaaagttccatggattcaaaggatatacagtgaaaagttacttccttccacctctgtttagcagttcccagttcctttatccagagacagccactgttttcagttccttctagaaatgttcagtgaatatacaaatatacgtatatttaacccatttttcaaaaagacacataatagcatatatagcattgttaaaaggaaaaaaaatgcaaagcagtatgtaatatcccagttgtgtaaagtatccatactgtatatgtttctgtatgcacaggaaatccctagaatgatactgttcaaacagtagccactagccacgtgtcactctttacattttaaataattaaaattaaataaaaaatgaaaactgaggctgggcacggtgttcacgcctgtaatcccagcactttgggaggtggaggcggacggatcacttgaggtcaggagttggagaccagcctggccaacatggggaaaccctgcctccactaaaaaacacaaaaattagctgggtgtggtggtgcatgcctgtaatcccagctattcgggagactgaggcaggataatcgcttgaacctagggggcagaggttgcagtgagctgagatcgctccactgcactccagcctgggtgacagagtgagactccagctcaaaaaaaaaaaaagaaaaagaaaaaatgaaaactcagtctctcacactagttttaatcatttagccctaaatgcttcatgagattaatcataaacatacttagcgatatgtgaagtagttttagctttgagtcattgccttaacactgtcacatttttcttcctatctaatttagggaaaacaaagaagaagagttaatcgacaaactggaggtggtcacaatgccttccccatcaccaaaaggactgccagtgaagcaatatgctgtgcagtctcagcttcccgtatatgagtggccggatgtgggatctggagaatatgatgttggagtagtggcttcgtttggccgacttttgaatgaggctcttattcttaaatttccctagtaagttttatttgtaaggaaatacagtatagaaaccttggtctttataaatggaccttgtatataaaatgtgataatttgaactctatgctttctgtaatattttctttttttatttttaccattttatttttctgtacatgtttgcttaaagtcaatgaatttctctgccaggttcaggtaactgaagggcctttagaagtagtttatattgtttaaacccaaggaatgctgcaaacacagtctggaacacaataggaaataacatctttctaaagacaggcttataaatttgaatccagtaacttaagatgttccctttctctggtaacagagttgattcataccaggctgctaggcctccagtcacaggtatagacaagaaaagagggtatagaccaccaaaagcaagaccaatccactctgtgttatggtacacgtttcacaattcaaatcacctgtattcgaaggaaaatttacaaaacttttgtaagctgtgtttgttgtaagaaaagggatcactgccattggtaagccagcagctgtaagagcctgtgtcatgttcaagacgcattgaaaaagaccatttgctatgaggccacagagagcattaaatccaacatatgctgatccctcttcaggtagattcctttctgcttgtggaagctggttaatttttctggttatgatatcaaagattgttaagttttccttgatagtattagatttatgattttccatcttgagccttatgctcttctcccagcagctggttggtgcctccccaggtcgtcttcagccatgcccgggctcactgaagcctttgctcaactcgcctgggcacagccatatttggctgacacatgactcggcctgatattttcttttcaagtactaaagaacattttatttgtggcatgagttgtcaaaatgtatttaactccttatcaccctctataggctttcatccaccttcatttaaattccatatatatgctgacaacgcccaaattggtccctctagctcagctcggtccccaaactctagtcccctaatacctactgcctccacagctcttcctggatgtctgatagccactttacattcaagatacccaaagcatctcctaaaatctttatctcaataaatggctactccatcattctagctgcttgcaccaaaatcctggagtcatgcttgatttcttacgtcccatatccaatccatcagtaaatcctattggctctgccttcaaaatctgtgtagaatctgtctgtatctcatcacttccgctgctgccactctcgcctacattactacagaagcctcctaactggtccctacttctgtccttggccctctcagtcttttaccaatccagcagccaaaatgtatttatttatttatttatttatttctattttattgtttaatttagagacagtcttgctgtcacccaggctggagtacagtgttgctatcataactcactgcagccccagactcaagggatcttcctgcctcagccttctgagtagctgagactataggaatgtgccaacacacccagctaactcttttttttttttttttttttttagagacagggatctcgctatgtggcccaacctggtcccaaactcctggctgcatgtgatcttcctgccttggcctcccaaagttttgggattacaggcatgagccactgtaccctgcctcaaagtgatccttttaaaacaagtcagatcatgtcactctgctcaaaatcctctggtaattttctgtcttactcaataaaaggccaggcctaactggcctcccagctgtgccttgaatttgccgagcatttaccttcttcaagatctttgtacttaatgttccctctgcctggaatgcttttctcccatatatatgcgtagttatttccttcttcatgttcttgttcaagtgttttcttgttggtaaagctttctctgatcactactaaaattgtaatatgtccccctcatagtcctctctgctttattttctccatagccctcagcatcatctggcaaaccttgtacatattttgttttttcttgcttatctcccactttttgtacataaactctctgagggcaggattttttttttctgtctggttcactgctgcttgtatgcctaacacttagaacagtgtctgcacatggagtgcgctcagtgaatgttggattgggctgaggatctcctgagcttgggaggttgaggctgcagtgagccatccagcctgggcaacagagcgagaccctgtctcaaaaaaaaattaaaaaaaaaaagaaaaagcttattttaggcagtctgtatgtaaaccaagtgaagtgaggatagttatgtgactaaactataaaattagaattgttcatgagatgcataatagggtttgagtggttctcttatagtcataaatgcattttaaaattttatttaaaaactcccagacatcatgggctgttgtagattttgcgacggagtttcgctcttgttgcccaggctggagtgcaatggcgtgatctcggttcactgcacctctgcctcccaggttcaagcgattctcctgtctcagccttccgagtagctgggattacaggcatgcgccaccacacctggctaattttgtctttttagtagagatggggtttctccatgttggtccggctggtctcaaactcccgatctcaagtgatccgcccgcctcggcctctcaaagtgctgggattacaggcatgagccaccacacccagacagaacatctttagaacagcaaatagttgtcctagctctgtttttaattaaatgtcattggtttcttatggtaagagagtgaatttacatgtaacttttttcctttcaggtgatacgagacttagatttaactgtcagtttttccaaatttctgggaaagtttcctaatgaaaagtagcataatagcttaggtagtggtaacgaagtggtaaagcccactgacatactaatttctacattttctaactcagtggcatattgaatgttcatcccagttgcctcccgagatggcgtggcccagcccctgtaatccatacagtgcttcacggagacacagttactggagtaacaattatgcaaattagacctaaaaggtagcacatattttcctttcttgagatttttgtgatttttaaatgttgatgtcagcctgtttggggggcagtggatgaatgggtggtgctcactaatttctgtgactccagagtgcttcttctgcttttatatcctttctgttttctcctggtttctaacataaaccatatgtcttttggtatttatgcggggtctctttaaagtccatatgtgaattttaatttgttaattgaaataggttatattattaatactcggatttctataaaatacattgtataaatgagagatggatttttgtatgttaattgttttgaatcttggttttgctggccttggtttctaaactatggccaaaaaatttttggaacctgaaataagaatatattgtatatcaatatgcaatataattgtcctaaaacattcattttttcctgtcatacctatagtttagaacaatttagaaacaatttagaacaattttttagaaacaattatttagaattacttgaggagtttattcagtctctgcctgttaccacctaatttccccttagaaaagaataattcacaagttcgcaagaacaacgtggtatctgggatttgctttaacttacttcagaaaacaagagagagagtagatgagacaagagtggcaaaactttggtagttctaaaatctgagccaggcatggtggctcacgcctgtaatcctaaactttgggaggccgaggtgggaggatcacttgagtctgggagttcaagaccagcctgggcaacatataaaaaataaaaaaattagccaggtgtggtgatacacacctgtagtcccagctactcaggaggctgaggtgagaggatctcttcagcctaggaggttgaggcggcagtgaggcaagatcgcaccactgcattccagcctgggcgacggagcaagaacctgtctcaaaaaaaaaaaaaaaaaaatctgaatgatgtgtatatgatgattcattagactgttcactccgtttttgtgaatgtttgcaatttttcacaataaacattttactaaagctcctaggttagaaatagaattaacaaaaacaaaaagcaaaaaaaaattaaataaagcatattgctcatgaaaacctatgaccagtgtttacagagcttgatataaaatgtcagacttgtgggaatgcaaatatacttgcatttacttttttttttttttcttgagacggggtctcactctgtcaccccggctggaatgtagtggggtgatctcagctcactgcaacctctgcttcccaggttcaagcgattctcctgctgcagcctcccgaatagctaggactacaggcacacgctaccatgcccggctaattttttgtatttttagtagagatagggtttcaccatgttggccaggatctcttgacctcgtgatccacccaccttggcctcccaaagtgctgtgattacaggcatgagccactacgcctggccctacttataatcacctatggtgataatctaggcaaaactcttatcctttgaggaagggactatagaaataaataattatgaacttcctaactgtacttccatggaaaataaattctttgccttatgcttttcatatacaaatagagattttttcatgctattactaatgatataatttttctgtaattgtaattaaattcctgatatgcaactgtatcgtttctttgctttagggaaaaataaatttagactctaaacacaggccatattttgttctcccgtctttcaaactgacatatcttccttgctaatgtctaacagccaaattaatagccagtgataaactatctttatttattttttttaagagataggggctagctgtgttgcccaggctggtctcaaactccagggatcaagcaatcctgctgcctcagcctcctgagcaactaggactataggcatgcagaccactgtacccagcttgtatctttttgtgtgtagacaaacattgattcaggaaatggtaatcattgtcattatttgcttttgattttttgctaggtttgatgtaggcccaattctcaaacaagaaactgttcctgtgccacccaagagcactgcaaaggaattggaagcagtgttgtcaagactgggtgccaacatggtataattccccaatatcctactgctttttactcatttagtgggtttcctaagtggttataaaaagaagaacaattttgtgacttctaattttcttaaaaacaaaaaagagtaatttctatctttggcttcctaaaaattagcctggcatttgtgatctcatgtaaatctttgagaatttacaaagagtaagtactgaataaaggctttcaagtgaaacaggtgatcttacatgacctactacatgccatagtgaggtcttagactattcttctcaatttcactctccgcactctggtatgtataccttgcatccctgtcagaatgaactaacagcaattttctaagcgactcttagctttccttccatttctttgcctggcttcagtcatttgcactagaattctgctgaccattctacctatagatgatccttcttttttctgtggctttgtatatataattcattgaaactgcatgagtagagtctgggtaaatgtttaatgactaaacttatgttttccatatgaacgggttaattttatacagaggaatatttttttcccacctgtagagatggtatttcctattctaggcacttacctcacaaatgatcttataatagtgactgccgtttattgaacattggcttgtgttctacaactgttctagatactgtatggactttttctttttaccctctcaactttgaggtagttgttgctgttgattgtttcacagatgatgacattgaaggccagagacaagctaaataacttttccacaatgagacagctggtaggtggtagaactaggacttgaacccagagctgggtgactccatagtacattgtcctgtgaggtttcactgccttggcccccatggggtgagagtgtgtatagccaagcccgggctatcctgatgccaaagcttccacagcattctctagaagtgaatcaatgacctgtactctacagaaagcagaatctctactgaggtttccccaagtagacacctatcctcacagcttaagccaatgtactaccttaccctgccacatagatcttttaaagttataggttcagccttgaagagccaatagtaaagattttttttttaatttgaaaaaagaaaaagaaaaaaagttataggttatttcatggtgctgaattgtaatgtgtttctgcttttgttcttcccttcattttgaatatatcacactcttttttttttttttgtagctcatttcagttttgaaaaatttgcctgaaagtctgagcaatggaaggcagcagccaatggagggggcgacttacggtgagtgaaggctgcagagactctcatctttctaaaggttctgcttgtcacgatagcatctgaacattctgacttcttagctgtacttttcccttaattttgattgagtgcccacttttgtgtgcttttccaaagaatggtagaaagcattctttctccctcttagcatatagcctcatgaaggattgagcatttttttccaacttcttgattttgaaaatattaaatagaaagactggtataataaacaccagtttaccccagagtcaacaattattaatgtttgtccatattttctttctctttatgtatttattacgtgtattttaaattctgcttattcatttggaagtatgaatcatgatctttcatctctaagtagtttagtatgcctttcctaagaaaaatgaacaatttcctgatagcatccaatgttcagttcatatttaagtgttcctaattgtctaaaaatttattttatagttttatttttcaaactaggatttaattgtaattagttgttatgtctctttagtctctaaaaaaaattcctctttttttcctctctctatgtcattgactttttgaagagaccaggccagttgtttgatttgttttcttccagtgttgtttaacttgttccctatctcttatatttcctataattagttctaaaggtttggctggattcaggcttaaagtttttggaaagagtgtgtttcagtgacatttgttttcttcttttttgttttttttagtagagttaggagtataaacatttgtttcagtttgtttttaattttagggattactttttatttttctttatgattaaatgttattttttgaatatgtaaaacatatagctgattcaaaagttaatatacctagagaagtctcacttttgtcccctacagtcttaaggtaccacttgagtaagccaagatatcagactgtactaaagcaagtgaagctaagtttgatcacttggttgagatggtgaccaccagatctttccagtgttaagatgtgttttcccttttgcaattagcaggtaatctgtggggtaattaatactctggcactgtgcagatatcctgttccctaacaacctttcacatgatggttttagtacagattgatattccttgcccaaatgaattatttcactatggattacaaaatggcaattttctaattccttttacatttaatagctggtattgttctggaaagaagagtttttcctcattaattggaggtgaattttagttcatcctaaaatggggacaggggcttaattctttctctttaattagaataagaagttgatgccattaattgccttcaattttggtgtcagatgcgttctttttagtatcatttgacgcgtagattttcattgattgtgttttacagtcataattctttatatttgcccagtgggagccccttaaatttggctcctacattctgttaacactcttcacttcccactagtttggagtgcttccttgcttccaccacagtatgtcccaggctcgcctatgtgtcctctggctcacactgaaatcaaccagtgtgatttccagggagcttttgttcattttagtggggttgataattagagatcatctggtacaacaatgtatggcaagataaggtatcagtggactaaactagaagttatatttttaaaaaatattcaagctcatattgtttatgattcaaatttatcattaaagggttttccttatattttctcacactatctttttttaaatattaacctatttatttgctattcataacatcatttcagcattacaataccaatattactactaagagtaaaaatactaagtaagatttaagatttctttacagttttcctttttgatccttagaatatatcctaaggatatacagtcagattactgccttcaaaacttcctggtaatgattattttttccatgtggttttgttacctagtttcatacatagttaagtttcagttgtttttttttttattttagggattgctttattttcttttatgattaaattttattttttgaatgcataaaatatttacatggttcaaaagttaaaacagcttaaaaaggtacactcatagaagtcctacttccatctctatcttatctaacccgtattcctccctctataggtaacatttttattagtttctgatttagtcttccagtgtttccttttgccaaaataagcaaacacctacatagtgttattttttatttttccttcacaaaaggtggcataaaatacatatttttctgtgcctttgttttttcacttaatagtgtatcatggagactacttcctattagtaagaagagattttcctccttctttcttttttttttaagatagggtctctgttacccaggctgaagtgcaatagtgtgatcatggcttactgcagtctcaacctcccaggctcaagcagtcctcccacctcagcctcccaagtagctgggactacaggtacattccaccatgcctggctaattttttaatttgttgtagagacaagttctaactatgttgctcaggttggtcttgaactcctagactcaagccgtcctcctgccttggcctcccaaaggcatgcctggccttctttttgttttttatggtggcatagttctcagctatgtgaatatatcataattaacccaacagatgtcttattgatgggcatttgggttgtttccaatcttttgctatttcaaataatagtaagattaggaagataacaggcacatggttattcagaatagtatagtaaaactacttggagtagttttaatgtaccttattcctgtcagtaatgttgaagatcttttcatatatttaagaactatttgcatttcttttttctgggtggtagtatatcttttgcccatgttcctatcaacattttggtctttttcttctcagttttttgagtacttatatttcataatagagaaattagtcctctctgagataacttgcaaattcagtttgtcatttgttttttgatttaacttatggcatttctttttgtctttttttttttttttaatttattttgcctaggcatggtagctcatgcatctaatcctagcactttgggaggatgaggcgggtggatcacttaaggttaggagttcgagaccagcctggcaaacatggcaaaaccctgtctctactaaaaatacaaaaaattagccaggcatggtagtgcacgcttgtagtcccagctactcgggaggctgaggcacaagaatctcttgagcctgggaggtggaggttgcagtgagctgagatcacgccactgcactccagcctgggtgacagggcaagaccctatctcaaaaaaaaaaaaaaaagtttgaatagtctcatttcatagttagaagggcattttctactcccaggatgtaaagaagttcacccatgttttattttaatatttatatgattatttatttattatttttacttgatatatggaaaattttgaacataaagaaaagttgagaggttagaatgaattctctggtatctcttattcagtatcaatagctgtcaattcatggacactgaccctgatgttcatttttgctcttggttttatcttgtagcccctaagatttctgctggtaccagttgtataaaatgggaggaacaaacttcagaacaaatattcagactttaccgtgccattggaaatatagtaagttgggaagtcaggttgcagttctacctagttggttttctatgtgtgtaatttgctttctaaatatttttatttaggaataatcccaaataaaaatatcccaaataaaaggttgatcttaggaacaaaacctagaaaacctgaaatttattcttaaaaattctttaagctgtttaaagtgtttatagagaccttagaattcacaaagcacttttaaatatatgtatattgcagtttcacataaccaagttttactatcctacttcataggtgaggggaaagaaatgagatgactaacaggaatgtccagtcactaaataatgaacttaaatcttctcactcctaatcctgtgcttcttccagtatgtctttctgcctttagccaattttttacaatcaaattgttaaatcattgatttctacatatggtacaccaagtgtagtaatataacagtttgttaaaatgtctgagttaaattctcagttcattgataaatttgtggggttttttcctttcatttcaatagctacttgtgttatttgaacactgagcttaccgtatgtgtgtttgtgtgtgtgtgttgttttattttttgagacggggtctagctctgtcacccaggcctggagtacagtggagaaaccttggctcactgcaacctctgcctcccaggctcaagtgagcctcctgtgacagcccctgagtagctgcaaccacaggcacacaccaccacacctggctaatttttgtatttttttgtagagacgaggttttgccatgttgcccaggctggtcttgaactgctgagctcaagtgatccgctcttctcagcctcccaaagtgctgggattacaggcacgagccactgtgcctggccaagtgtgtggtttttaatggaccatctctgttattaatgttgggtaaaatggggaaccaccattggatatctatagcatgctaaattcttcagtaaggaggatcacagactcatgttatagttattatcatcccactttaaagttgaagaaattgaggcttaaagtagataatgaattgttattaagtgttactcgatgtcgtgttgctagttaatgaaagtcagagtcaggttttgaacgagatctatcttacttcaaatcctattattttcctgctgccacagaatggcatcaggaaacaaggaccatagggccagacagtgctgggttccatcttgactctgctacttcctaacgtcgtagactcaggaaagttatttaacctccgagctttagtttgttccttggaatatcagggctggtataatatatttacagcatcttgtacagtatctggcacagaataggtactcattaaatgatagctgctattattcattcattcattaaacaaaatatttattgaaggcctattatgtgtcaagcagtgtactaggtactatagaaacaggtgttgtgggaggacagacaacaagtaagcaaaaaaaaaaaaaaaaaatcaggccaggcatggtggctcacacgtgtaatcccagcactttgggaggctgaggcagatgcatcacctgaggtcaggagtttgagaccagcctggccaacatagtgaaaccctgtctctactaaaaacacacaaaaaaattagctgggcgtggtggcatgcgcctgtaatcccagctactagaaaggctgaggcaagaaaattgcttgaacctaggagacagaggttgcagtgagccaagatcacaccactgcactccagcctgggcgacagagcaagactctgtctcaaaagaaaaaaaaaaaaaaagaccgggcatggtggctcacgcctgttatctcagcactttgggaggccgaggcgggcggatcacctgaggtcaggagttcgagaccagcctgaccaacatggagaaaccccgtctctactaaaaatacaaaaaaattagccagacctagtggcgcatgcctgtaatcctagctacttgggaggctgaggcaggagaattgcttgaacccaggaggtggaggttatgatgagccgagattgcacattgcacaccagcctgggcaacaagagcgaaactccatctcaaaaaaaaaaaaaaaaaaatcaaatagtgtgataaattccttgatgaaaataaaaataggatcatgtgatagaataactggaggttattttagatcggtgatggggaaagcctctttctgacacttaagctgaaatctgaaagacaataaggagccagccatgcctagaacagagaagagcattccaggcagaggaacagctagtacaaaacccaaggtgggctaacccaaagaatcacaagaaaaggaaactccagactgatatccctgaatatagatgcacaagtcctccacagagttagcaaactgaatccagcaacatataaaaaaggattatacatgatgactaagtgggattgttttttgggttttgttttttgttttttgttttttttttttgagatggtgtctcgccctgtcgcctaggctggagcgcaactgtgcagtttcagctcactgcaacctccgccttctgggctctagcaattctacctcagcctcctgagtagctgggattacaggcatgcagcaccatgctcagctcatttttttgtatttttagtagagatggggtttcaccatgttggccaggctgatctcaaactcctgaacttgagtgatccgcccacctcagcctcccaacatgctggcattacaggtgtgagccatcacaccctgccccaagtgggatttatcccaggaatgcaaggttggttcaacatatgaaaatcagtcaatgtaacatatcatattagtagaataaaggacaaaagctacatcactgtctcaatagatgcagaaaaagcatttgacaaaatccaacacatgtaaaaaaacctcaataaactagaaatagaagagcatttcctcaacttgataaaggacatctatgaagaccctgtaactaacatcatacttaatgaaagaagccaagtgcagtggtggacacttgtagtcccaggtattttggaggctgagcgggaggattgcttgaggccaggagttcgagaccagcctggacaatatagccagactttgtctcttaaaaaaaaaagaagaagaaagaaagaaaataaaagaaagacaaagcctttcccttaagatcacaaagaagataaagatgtctgcgctctcaaagttaaatgtcttctattcaactttgttctgttggggcagttagacaagaaaaaagaaacaaaaggcaaccaaacaaaagtttggaaaggaagaagtaaagctgtctctatttgtggatgatatgatctagcatatagaaaatcatgaagaagttccaaaaaaaactattagagctaataaacagtaaagaagacccaagtaaatggaaagaccccagtattcattgattggataaacttagtattgttaagatgtctctactccccaagttgatgtacagattcaacacaattcctaaaaaaaaaatcccaattggcttctttgtacaaattgacaagctgctcctaaaatgtatacagaattgcaaggggcccagaatagccaaaactaacaaaattggaggactcatagttttcagtttcaaaacttgctgtaaaactacagtaaccaagatagtgtggtactggctatagctcattagaatcgaattaagggtctagaaataagccaggcatgatggcttatgcctgtagtcccagcactttgggaggctgaggcaggtggatcacttgaggtcaggagtttgagaccagcctggccaacatggtgaaacctcatctctactaaaaatatttacaaaaattagccagatatggtggtgcacgcttgtagtcccagctactcaggaggctaaggcacgagaatcacttgaacctgggaggtggaggttgcagtgacctgagatcacaccactgcactccagcctgggtgacagagtgagactctgtctcaaatttttttaaaagtctagaaataaacccatacatttatggtcaattgatttttttttctaaaggtagttcccaaaagatagttctttttattattattattattattatactttaagttctagggtacatgtgcacaatgtgcaggtttgttacatatgtatacatgtgccatgttggtgtgctgtacccattaactcatcatttacatgaggtatatctcctaatgctatccctctcccctcccacccacctttttttttttttttttttttttttttttgacaagagtgccaagacaatccaatggagaaagaatagtattctcaataaatggagctgggataactggatgtccacaatcaaaagaatgaatttggaccctatgtcacatcatatgtaaaagttaaagaagctaaatgaatagctaaaactagaaaactcttagaagaaaatataggtgtaaatattcatgacattgaattaggcagtggtttcttagctatgatgccatgaagcataagcaatcagactaaaaatagagaaattggacttcatcaaaattaaaaatagttgtgcttcaaaggacactatcaacaaagtaaaaaagacaggtaggccaggcatggtggctcatgcctataatcccagcactttgggaggctgagacaggaggactgcttgaacccaagaatttgagaccagactgggcaatgtagtgagtccccatcattacaaaaagtaaaaaattagctgggcatcatggtgcacacctgtggtcctagctacttgggaggctggaatgggaggatgcacttgagccagggaggtcgaggctgcagtgagctgtgattgcactactgtgtttcatcctgggtgacaaagtgagaccctgtctcaaaaaaaaaaaaaaaaaaaaaaaaaaaaagacagcttacagaatgggagggaatatttgcaaatcatataactgataagggcctaatatccagagtaaagaattcttacaatgactcagcagtaaaacgacaaataacccaattaaaaatggccaaaaattctgagtaaacatttcttttttgtttgtttttgagatggagtcttgctcttgttgcccaggctggagtgcaatggtgcgaccttggctcattgcaacctctgcctcctggattcaagcgattctcctgcctcagcctccctagtagctgggattataggcaagcgccaccacgcccggctaatttttgtacttttagtagagacggggtttcaccatgttgacctggctggtctcgaactcctatcctcaggtgatccacctgcctcagcctccctaagtgctgggattacaggcatgagccactgccctggccctgagtagacatttgtttcaagcagatacataatatgaatggccagtaagcatataaaagatcagcaacttcatctgtctttagggatatgcaaatcagaaccacaatgagataccacttcacacccattaggatggctataattcaaaaaacagacaaaaactagtgttggcaaggatgtggagaaatttggaaacttcatacattcatggtaccatgtttacctcttaaaaatggtgcaacctgtgtggaaaacagtttggcagttcctcaaaaagtgaaacacagaagtatcttatgacccagcatttcctttcctaggtttatactcaagagaattggaaacattgtgctcacacaaaaatgtgtacccgaatcttcatagcagcattattcagaatggccaaaaagtgaaaacaacccaaatatccaactgagggatgcgttaaaaaaatgtggtatatagccatacggtggaatattattaatactcagccataaccataatcacatgcttatgacatggatgaacctgaaaaatatgctaagtgaaaaaaccctgtcacaacagactacatatgttattattccatttatatgaaatgtccaaaataggcaaatccataggctggaggagagaggataatgggaattttctgataatggatgtgcgttttttctgggagagagaggtaatgaaaatgttctaaaaattaggcaagaaaaaaacgagtgacattggttgaatgaccctgagtctactaaaaaccactgacttggaagcttcaaaagggtgaattttctggtatgtgaattacatctcaataaagctgtcaaaaaacaaaacaaaacaaaaaaacaacccaagatggaaaagagttggacatgtttgagggacagaaatgaggctggtgtggctggagcatagctggcaagatggagagtagctaaggtgaggggagaagcaagattgagtaggattgacatcagagggccacggcaggggagtaatgggattaggtatgtacattcttaaaaggttgccctggctgctgctagagagtggagtggaggtcagttagggaattggttgggtgtggtggctcacacctgtaataccagcactttgggaggccaagaagagtgaatcgcttgagccctggagttccagaccagtctgggcaacatggtgaaaccctgtctctacaaaatatacaaaaattagctaggtattgtgggatgcacctgtagtcccagctactcgggaggctgaggtaggaggatcacttgaccctgggaggttgaggctgcagtgagctgtgattccaccactgcactccagcctggatgacagagcaagatccggtctttaaaaaaaaaaattaaaaaaataaaaagaagctgctgcgactgtagccagatgacagatgatggcagtttggaacaatgataatggtggataaaaagaagtggacatccagactatgcttggagatagagtcagcggaatttgctgatggaatctgggaaattagagatagataaattaggatcattcatagatttttggcttgagaaactgggtgaatagtggaaccatttaattgagatgaggatgtctggggaggaacatttgggaagagaaatcaatagttttggccatgttaagtttgacatatattaagttagaagacgttcatatggagatatcaagtagacaacttcctgagatgcaatttaggccagtagcttgaaatctcttggcacctataacttactacatgatgattcttaccctctgcggtttatcttccctgtacatggagaaaagctttgtgctataaaagactgagccagaaggtggggtttggttcctagagttgccctttactaatgagaggaaggcccttgtctttgagcttctgctttttttacctctaaagtgggattaatgaccatgtacacaactggcaagatcaaaggaaatgaactaggtgaatgtaaattcatgcaaacatactattttggcagtaatgatggcagacaccaaaatgattatattcttaccatccctttcctttctacaatgctctgatgataaggtgagctttacctcccgaagaacaagactatattctgagtatgtacctagcatgtttattactctcagtaaatagaaatcttttttagtcagtaagcatgtttcaaaaatattttgagttatttaaaagaaaaaaattgcacatatgaaaatcgtttcagaacttttattgaagcgggcaaaagaaaagtgagctagcaagttatagaagaggctatgacatagatacagttatgaacttgttcttcaaattcatttacttatttgatttaatgttcaaattattacaacaacctaactcttctgaaagttaaataccctctttaaggggtgtcataaaaagagcactgcactgagaatcagaaaacagaagccagtcctggctttgctactaactagctgggtccaaccttgggaaaatagctgcatttctctgagcctcactctcttcatgtatgaaatagaggattgaactacagtctggaaataaatgcattcaattcagaaattttagagaacttatttcctggtgtgtgttaaattttattaacatttaaatcaggctgtaggatctcaggtatgttggaaatgtgttacatgataaaggtggtatttcatactggagggaagggtaagatggattatctagtaaatagtattgggataactggccaaccattggtgggggaagccctcaaatcctatcttttaaaatcatagtaagtgctatattataacaatgcatatgtagttaacaatactgtatggtatacttacaatttgttaattgagcacatttttcttatgtgttttttaccataataaaaaaatcaaaatatagatggatcaaggatttaaatataaaaagtaaaatcacaaggactataaaaaagcacaactgaataatttgacaatatttaataatcttaaagtgtggggtaggcctttttaagtatgatatgaaccaccaaagtaatgagagaaaagacttagaaatataattatgaaaataaaaaacttatgcatggaaaaaatggctgtccccaagattaaaagtcaacaaactgaggaaaatattcacaacacatgtaagagttaaaaggctaatttcctaaatatagaaaatatttttgcaaattaatgagataaccatcccagttttaaaaaatataaccaaagggcataaataggcaggttacagataaataaattaaaagtgcacataaatatatggacagcttctcagcttcgctaataataaacagcaagaggttatcatatttttttctcacttatccaggcagtttagcaataaaatgttgatgctgtttaacccacgcattccactttaaaaacaaaaaaccccaaaactattatccagaaatgtgtaagccctcaaagatatatcgacaaggttattaccctagtttatagtgttataaatagcaataaattgaaaataacaaatatctatcataaaggtagttgcataaattacatattcataaaatgggttactgtgcagcagatagagtgaaattgataagtatgtactgatgaaacatcaatgctttatggtcacataacaaaagtccttgtaaaacagtattgatgcaggactttttgctccttaactcagctaaaatctgggttcttgtctcacaaccaggaaaaattaggcacgtggacacattgaaaggtgaggagagtggaatttattaaaagaaagctctcagcaaaaaaagagggggtcctgccaacaggctcccacctcacagattgaataccaggccaccacacaggagctgaagaggccaggctcttcccctgcataaggcagaaattcctggtggctccacccccattcttccagtgctcatgcgggcccttagtctgagccacgccaccttgatttatttcctttactgtgcatgtgttaagggacagaacttttcaccatggacatgttgagtcaagcccactgtgcataatgacctgggtggcatttggctgtctcctgtctctatcactgtgttctagatttttataataatatttgtagaaaaaaatacagggaaatgcacatcaaacttaacagtcgttacctatagggatgggaataaatacagaatatcactttctaaaattttttaacataatgtaatgcttgcattttttataaggataataaatttttaattggaaatattagtatattagatataaacattgattttaaagtaacatttaagatcttataaatcggccgggcgcggtggctcacgcctgtaatcccagcactttgggaggctaaggcgggcggatcatgaggtcaggagatagagaccatcgtggctaacatggtgaaaccccgtctctacttaaaatacaaaaaattagccgggcatggttgcaggcgcctgtagtcccagctactcgggaggctgaagcaggagaatggcgtgaacccgggaggcggagcttgcagtgagccaagatcacaccactgcactccagcctggtgacacaacgagactccgtctcaaaaaaaaaaaaaaaaagatcttataaatcctggaaacactgatgtagagagtcatgtttatggtctgttccatcaaacttagtgactgagttcccaattcctctaattgaaagaaaagtccagattaacacaaaatagtagttgaaaagggtttgggagttgagtgtattcctttatcataccttctttaattttacttgcagattccgttgcagacgctctggatggcgaataccattaaacttctggatttggtagaagttaacagttcagtccttgctggtactaacttttgaatagctaacatggaagctgttttcactgtagtgtatctggaaatacgtctgttttatcatatgtcacaattactaaaaataacttttagtttgtttcagttcagtaattataatactttacattcacttattgtcttattctttgcaacactcattctcatatattttctcatttaatcattacaagaacaggccaggcgcggtggctcacgcctgtaattccagcactttgggaggccaaggtgggtggatcagctgaggtcaggagttcgagactagcctgactgacatggtgaagccccgtctctactaaatacaaaaatttagctgggcatggtggcacatgcctgtaatcccagctacttgggaggctgaggcaggagagtcacttgaacctgggaggcagaggtttcagtgagccaagattgcgccgctgcactccagcctgggcaatgagtgaaactccatttcaaaaaaaaaaaaaaaaaatcattacaggaccctggggagtaggcaaagcagtgttcctatcccattttaagctctgtgatttcctgccttaaggttttcagagagtgcagaatgactcgattagtttcattctggtgaatattataatgaaaatatctgggcaaatcagtgaaaatctaggccagagtgtattcatacttcatgccacaagtccattctgaggcccatcagcatcctgccaatacggtggacagaaggaatgtgagccacagaggaagctggtttaatttagaggtagttggagttccccaggaacctaggaattaggatttgtttgggcagggatgaaagggccagcctaaatcctaaacatcctatgtatttccccctgttggctagttatttcaccaaagcgctaacacaaaacttgtagattcagcattttaggtggtcactgggtaaaggaattatagctttgtatgtgcatgggaagctttcctttgggtttctgatgtacagagagcactgtggtttccttgtaagttttggtttacaaagtcaacatcagcaaatgtgttctctccggtatcagtactgcctcccaagatgttttttgatttttaagaagtactatgaagttgcataattgcttttttctcttgtatatcttttcttttttccattcttcagatccaaaattaacgggacaggctcttattccaggatcagtaatataccacaaacagtcacaaatactattggtttattgcaaggtatgtttttcattagtttcaagttatcatagttgttttactatgttatagtctgtatcatttattatttttagttggaacttcacttaactgcctgtccatagattgggtcaggagatcatttaattttcttaagaaatagtgaagtctctagcataattttttgaaagtgatgaagttttgccaaggcattattattactcaaagaaagaagattcagtaacttgagtgctttcttaaaagaacacgtgtattttcagtagcccaatttaattaacagctcttgtgcttggtaacataaaagatagtcatatcaaaatatctgactgaactactacaggacacacatatcctacttgcttttactgcttaacagtagtaaagaggagatttctgaactttttaaaataactttggaatcattattgttttataagatcatggtgtgttctgagaagtgttctacattccttccatttcctaggtattttgcatcatatggtgttcatgtgagatatttcatacttaagagtgtttagccgggcaaggtggctcacacatgttatcccagcactttgggaggctgaggcgggtggatcacctgaggtcgggaattcgagaccagactgaccaacatagagaaaccccgtctttactaacagtacaaaaattagtcgagcgtggtggcagacgcctgtaatcccagctacttgggaggcttaggcaggagaatcgcttgagcccgggaagcggaggttgtggtgagccgagatcgtgccatcacactccagcctgggcaataagagcgaaactccatctcaaaaaaaaaaagaaaatgtttaaaatgtgtgatagattgatctgacctacagactgtgaatacaaaactccatcaacctctctttgtctctcgccagcttattctggaacagtgttggatgcatatgtcttgctgtccttttctgggtctatatatatgtatttcccttttttttttttttttttttttgagatggagttgcccaggctggagtgtagtggtgtgatctcagctcactgcaacctccacctcctgggttcaagcgattctcctgcctccgtcttccaagtagctgggattacaggcacccgccaccacgcctggctaatttttgtatttttgtaaggacggggtttcgccatgttggtcaggctggtcacgaattcctgacctcaggtgatccacccgcctcggcctcccaaagtgctgggattacaggcgtgagccaccacgcctggcctatatgtgtatttcatgttacataccttttattctgctccctttgtatttaaatatttatacagatctatacatttgttatcgctccttggtaataagcttttaatttcagtgtcaaaaaccgcaatgacttttgcaccaacctaatagagtcaaggaattctacatgttacttagtgtagtgctgtttgcagctaggcatttagtaaagatttgttggtttgtttgtttccatgataaaaattttataaactaatatttacttggctttttagttttgccacccctgcctattcactatttgtattttgccctttaggatggttggattggtgttcgatcagtgatgctcaagaaatcactaacagctactgacttctacaatggatatttgcacccctggtaccagaaaaattcccaagctcaaccaagccaatgcagatttcagactctcagacttccaacaaagaagaagcagaaaaaaactgttgctatgcaacaatgcattgagtagttaggaagaagatggataaaaacctattacatatttgtaatttattaaaaaccttatttacaaggaattatctggacttttttttttttttttttttttgagacagagtctcactctgtcacccaggctggaatccagtggcactatctcagctcactgcaacctccgcctcccaggttcaagcaattctcctgcctcagcctcctgagtagctgggattacaggcacacgccaccacacgcagctaatttttgtatttttagtagagatggggtttcaccatgttgttcaggctggtctcgaactcctgaccttgtgatctgcccacctcagcctcccaaagtgctatgattacagacgtgagccaccgtgcctggcctggaattatctggactttcaaagaagatggcattattataagaagagaagattattgccgaaaagatggattgcctcactttccactttttatgtaacagtagttaaaaaacagctttttttttacttgaattacaaaaaagtttaaataaaacttgtatttatgatacgaaa

SEQ ID NO: 10231 - DNA, 4167 bp, Homo sapiens; identical to SEQ ID NO: 7710
  SITE (268): n equals a,t,g, or c
  SITE (269): n equals a,t,g, or c
  SITE (270): n equals a,t,g, or c
  SITE (271): n equals a,t,g, or c
  SITE (272): n equals a,t,g, or c
  SITE (273): n equals a,t,g, or c
  SITE (274): n equals a,t,g, or c
  SITE (275): n equals a,t,g, or c
  SITE (276): n equals a,t,g, or c
  SITE (277): n equals a,t,g, or c
  SITE (278): n equals a,t,g, or c
  SITE (279): n equals a,t,g, or c
  SITE (280): n equals a,t,g, or c
  SITE (281): n equals a,t,g, or c
  SITE (282): n equals a,t,g, or c
  SITE (283): n equals a,t,g, or c
  SITE (284): n equals a,t,g, or c
  SITE (285): n equals a,t,g, or c
  SITE (286): n equals a,t,g, or c
  SITE (287): n equals a,t,g, or c
  SITE (288): n equals a,t,g, or c
  SITE (289): n equals a,t,g, or c
  SITE (290): n equals a,t,g, or c
  SITE (291): n equals a,t,g, or c
  SITE (292): n equals a,t,g, or c
  SITE (293): n equals a,t,g, or c
  SITE (294): n equals a,t,g, or c
  SITE (295): n equals a,t,g, or c
  SITE (296): n equals a,t,g, or c
  SITE (297): n equals a,t,g, or c
  SITE (298): n equals a,t,g, or c
  SITE (299): n equals a,t,g, or c
  SITE (300): n equals a,t,g, or c
  SITE (301): n equals a,t,g, or c
  SITE (302): n equals a,t,g, or c
  SITE (303): n equals a,t,g, or c
  SITE (304): n equals a,t,g, or c
  SITE (305): n equals a,t,g, or c
  SITE (306): n equals a,t,g, or c
  SITE (307): n equals a,t,g, or c
  SITE (308): n equals a,t,g, or c
  SITE (309): n equals a,t,g, or c
  SITE (310): n equals a,t,g, or c
  SITE (311): n equals a,t,g, or c
  SITE (312): n equals a,t,g, or c
  SITE (313): n equals a,t,g, or c
  SITE (314): n equals a,t,g, or c
  SITE (315): n equals a,t,g, or c
  SITE (316): n equals a,t,g, or c
  SITE (317): n equals a,t,g, or c
  SITE (318): n equals a,t,g, or c
  SITE (319): n equals a,t,g, or c
  SITE (320): n equals a,t,g, or c
  SITE (321): n equals a,t,g, or c
  SITE (322): n equals a,t,g, or c
  SITE (323): n equals a,t,g, or c
  SITE (324): n equals a,t,g, or c
  SITE (325): n equals a,t,g, or c
  SITE (326): n equals a,t,g, or c
  SITE (327): n equals a,t,g, or c
  SITE (328): n equals a,t,g, or c
  SITE (329): n equals a,t,g, or c
  SITE (330): n equals a,t,g, or c
  SITE (331): n equals a,t,g, or c
  SITE (332): n equals a,t,g, or c
  SITE (333): n equals a,t,g, or c
  SITE (334): n equals a,t,g, or c
  SITE (335): n equals a,t,g, or c
  SITE (336): n equals a,t,g, or c
  SITE (337): n equals a,t,g, or c
  SITE (338): n equals a,t,g, or c
  SITE (339): n equals a,t,g, or c
  SITE (340): n equals a,t,g, or c
  SITE (341): n equals a,t,g, or c
  SITE (342): n equals a,t,g, or c
  SITE (343): n equals a,t,g, or c
  SITE (344): n equals a,t,g, or c
  SITE (345): n equals a,t,g, or c
  SITE (346): n equals a,t,g, or c
  SITE (347): n equals a,t,g, or c
  SITE (348): n equals a,t,g, or c
  SITE (349): n equals a,t,g, or c
  SITE (350): n equals a,t,g, or c
  SITE (351): n equals a,t,g, or c
  SITE (352): n equals a,t,g, or c
  SITE (353): n equals a,t,g, or c
  SITE (354): n equals a,t,g, or c
  SITE (355): n equals a,t,g, or c
  SITE (356): n equals a,t,g, or c
  SITE (357): n equals a,t,g, or c
  SITE (358): n equals a,t,g, or c
  SITE (359): n equals a,t,g, or c
  SITE (360): n equals a,t,g, or c
  SITE (361): n equals a,t,g, or c
  SITE (362): n equals a,t,g, or c
  SITE (363): n equals a,t,g, or c
  SITE (364): n equals a,t,g, or c
  SITE (365): n equals a,t,g, or c
  SITE (366): n equals a,t,g, or c
  SITE (367): n equals a,t,g, or c
  SITE (368): n equals a,t,g, or c
  SITE (369): n equals a,t,g, or c
  SITE (370): n equals a,t,g, or c
  SITE (371): n equals a,t,g, or c
  SITE (372): n equals a,t,g, or c
  SITE (373): n equals a,t,g, or c
  SITE (374): n equals a,t,g, or c
  SITE (375): n equals a,t,g, or c
  SITE (376): n equals a,t,g, or c
  SITE (377): n equals a,t,g, or c
  SITE (378): n equals a,t,g, or c
  SITE (379): n equals a,t,g, or c
  SITE (380): n equals a,t,g, or c
  SITE (381): n equals a,t,g, or c
  SITE (382): n equals a,t,g, or c
  SITE (383): n equals a,t,g, or c
  SITE (384): n equals a,t,g, or c
  SITE (385): n equals a,t,g, or c
  SITE (386): n equals a,t,g, or c
  SITE (387): n equals a,t,g, or c
  SITE (388): n equals a,t,g, or c
  SITE (389): n equals a,t,g, or c
  SITE (390): n equals a,t,g, or c
  SITE (391): n equals a,t,g, or c
  SITE (392): n equals a,t,g, or c
  SITE (393): n equals a,t,g, or c
  SITE (394): n equals a,t,g, or c
  SITE (395): n equals a,t,g, or c
  SITE (396): n equals a,t,g, or c
  SITE (397): n equals a,t,g, or c
  SITE (398): n equals a,t,g, or c
  SITE (399): n equals a,t,g, or c
  SITE (400): n equals a,t,g, or c
  SITE (401): n equals a,t,g, or c
  SITE (402): n equals a,t,g, or c
  SITE (403): n equals a,t,g, or c
  SITE (404): n equals a,t,g, or c
  SITE (405): n equals a,t,g, or c
  SITE (406): n equals a,t,g, or c
  SITE (407): n equals a,t,g, or c
  SITE (408): n equals a,t,g, or c
  SITE (409): n equals a,t,g, or c
  SITE (410): n equals a,t,g, or c
  SITE (411): n equals a,t,g, or c
  SITE (412): n equals a,t,g, or c
  SITE (413): n equals a,t,g, or c
  SITE (414): n equals a,t,g, or c
  SITE (415): n equals a,t,g, or c
  SITE (416): n equals a,t,g, or c
  SITE (417): n equals a,t,g, or c
  SITE (418): n equals a,t,g, or c
  SITE (419): n equals a,t,g, or c
  SITE (420): n equals a,t,g, or c
  SITE (421): n equals a,t,g, or c
  SITE (422): n equals a,t,g, or c
  SITE (423): n equals a,t,g, or c
  SITE (424): n equals a,t,g, or c
  SITE (425): n equals a,t,g, or c
  SITE (426): n equals a,t,g, or c
  SITE (427): n equals a,t,g, or c
  SITE (428): n equals a,t,g, or c
  SITE (429): n equals a,t,g, or c
  SITE (430): n equals a,t,g, or c
  SITE (431): n equals a,t,g, or c
  SITE (432): n equals a,t,g, or c
  SITE (433): n equals a,t,g, or c
  SITE (434): n equals a,t,g, or c
  SITE (435): n equals a,t,g, or c
  SITE (436): n equals a,t,g, or c
  SITE (437): n equals a,t,g, or c
  SITE (438): n equals a,t,g, or c
  SITE (439): n equals a,t,g, or c
  SITE (440): n equals a,t,g, or c
  SITE (441): n equals a,t,g, or c
  SITE (442): n equals a,t,g, or c
  SITE (443): n equals a,t,g, or c
  SITE (444): n equals a,t,g, or c
  SITE (445): n equals a,t,g, or c
  SITE (446): n equals a,t,g, or c
  SITE (447): n equals a,t,g, or c
  SITE (448): n equals a,t,g, or c
  SITE (449): n equals a,t,g, or c
  SITE (450): n equals a,t,g, or c
  SITE (451): n equals a,t,g, or c
  SITE (452): n equals a,t,g, or c
  SITE (453): n equals a,t,g, or c
  SITE (454): n equals a,t,g, or c
  SITE (455): n equals a,t,g, or c
  SITE (456): n equals a,t,g, or c
  SITE (457): n equals a,t,g, or c
  SITE (458): n equals a,t,g, or c
  SITE (459): n equals a,t,g, or c
  SITE (460): n equals a,t,g, or c
  SITE (461): n equals a,t,g, or c
  SITE (462): n equals a,t,g, or c
  SITE (463): n equals a,t,g, or c
  SITE (464): n equals a,t,g, or c
  SITE (465): n equals a,t,g, or c
  SITE (466): n equals a,t,g, or c
  SITE (467): n equals a,t,g, or c
  SITE (468): n equals a,t,g, or c
  SITE (469): n equals a,t,g, or c
  SITE (470): n equals a,t,g, or c
  SITE (471): n equals a,t,g, or c
  SITE (472): n equals a,t,g, or c
  SITE (473): n equals a,t,g, or c
  SITE (474): n equals a,t,g, or c
  SITE (475): n equals a,t,g, or c
  SITE (476): n equals a,t,g, or c
  SITE (477): n equals a,t,g, or c
  SITE (478): n equals a,t,g, or c
  SITE (479): n equals a,t,g, or c
  SITE (480): n equals a,t,g, or c
  SITE (481): n equals a,t,g, or c
  SITE (482): n equals a,t,g, or c
  SITE (483): n equals a,t,g, or c
  SITE (484): n equals a,t,g, or c
  SITE (485): n equals a,t,g, or c
  SITE (486): n equals a,t,g, or c
  SITE (487): n equals a,t,g, or c
  SITE (488): n equals a,t,g, or c
  SITE (489): n equals a,t,g, or c
  SITE (490): n equals a,t,g, or c
  SITE (491): n equals a,t,g, or c
  SITE (492): n equals a,t,g, or c
  SITE (493): n equals a,t,g, or c
  SITE (494): n equals a,t,g, or c
  SITE (495): n equals a,t,g, or c
  SITE (496): n equals a,t,g, or c
  SITE (497): n equals a,t,g, or c
  SITE (498): n equals a,t,g, or c
  SITE (499): n equals a,t,g, or c
  SITE (500): n equals a,t,g, or c
  SITE (501): n equals a,t,g, or c
  SITE (502): n equals a,t,g, or c
  SITE (503): n equals a,t,g, or c
  SITE (504): n equals a,t,g, or c
  SITE (505): n equals a,t,g, or c
  SITE (506): n equals a,t,g, or c
  SITE (507): n equals a,t,g, or c
  SITE (508): n equals a,t,g, or c
  SITE (509): n equals a,t,g, or c
  SITE (510): n equals a,t,g, or c
  SITE (511): n equals a,t,g, or c
  SITE (512): n equals a,t,g, or c
  SITE (513): n equals a,t,g, or c
  SITE (514): n equals a,t,g, or c
  SITE (515): n equals a,t,g, or c
  SITE (516): n equals a,t,g, or c
  SITE (517): n equals a,t,g, or c
  SITE (518): n equals a,t,g, or c
  SITE (519): n equals a,t,g, or c
  SITE (520): n equals a,t,g, or c
  SITE (521): n equals a,t,g, or c
  SITE (522): n equals a,t,g, or c
  SITE (523): n equals a,t,g, or c
  SITE (524): n equals a,t,g, or c
  SITE (525): n equals a,t,g, or c
  SITE (526): n equals a,t,g, or c
  SITE (527): n equals a,t,g, or c
  SITE (528): n equals a,t,g, or c
  SITE (529): n equals a,t,g, or c
  SITE (530): n equals a,t,g, or c
  SITE (531): n equals a,t,g, or c
  SITE (532): n equals a,t,g, or c
  SITE (533): n equals a,t,g, or c
  SITE (534): n equals a,t,g, or c
  SITE (535): n equals a,t,g, or c
  SITE (536): n equals a,t,g, or c
  SITE (537): n equals a,t,g, or c
  SITE (538): n equals a,t,g, or c
  SITE (539): n equals a,t,g, or c
  SITE (540): n equals a,t,g, or c
  SITE (541): n equals a,t,g, or c
  SITE (542): n equals a,t,g, or c
  SITE (543): n equals a,t,g, or c
  SITE (544): n equals a,t,g, or c
  SITE (545): n equals a,t,g, or c
  SITE (546): n equals a,t,g, or c
  SITE (547): n equals a,t,g, or c
  SITE (548): n equals a,t,g, or c
  SITE (549): n equals a,t,g, or c
  SITE (550): n equals a,t,g, or c
  SITE (551): n equals a,t,g, or c
  SITE (552): n equals a,t,g, or c
  SITE (553): n equals a,t,g, or c
  SITE (554): n equals a,t,g, or c
  SITE (555): n equals a,t,g, or c
  SITE (556): n equals a,t,g, or c
  SITE (557): n equals a,t,g, or c
  SITE (558): n equals a,t,g, or c
  SITE (559): n equals a,t,g, or c
  SITE (560): n equals a,t,g, or c
  SITE (561): n equals a,t,g, or c
  SITE (562): n equals a,t,g, or c
  SITE (563): n equals a,t,g, or c
  SITE (564): n equals a,t,g, or c
  SITE (565): n equals a,t,g, or c
  SITE (566): n equals a,t,g, or c
  SITE (567): n equals a,t,g, or c
  SITE (568): n equals a,t,g, or c
  SITE (569): n equals a,t,g, or c
  SITE (570): n equals a,t,g, or c
  SITE (571): n equals a,t,g, or c
  SITE (572): n equals a,t,g, or c
  SITE (573): n equals a,t,g, or c
  SITE (574): n equals a,t,g, or c
  SITE (575): n equals a,t,g, or c
  SITE (576): n equals a,t,g, or c
  SITE (577): n equals a,t,g, or c
  SITE (578): n equals a,t,g, or c
  SITE (579): n equals a,t,g, or c
  SITE (580): n equals a,t,g, or c
  SITE (581): n equals a,t,g, or c
  SITE (582): n equals a,t,g, or c
  SITE (583): n equals a,t,g, or c
  SITE (584): n equals a,t,g, or c
  SITE (585): n equals a,t,g, or c
  SITE (586): n equals a,t,g, or c
  SITE (587): n equals a,t,g, or c
  SITE (588): n equals a,t,g, or c
  SITE (589): n equals a,t,g, or c
  SITE (590): n equals a,t,g, or c
  SITE (591): n equals a,t,g, or c
  SITE (592): n equals a,t,g, or c
  SITE (593): n equals a,t,g, or c
  SITE (594): n equals a,t,g, or c
  SITE (595): n equals a,t,g, or c
  SITE (596): n equals a,t,g, or c
  SITE (597): n equals a,t,g, or c
  SITE (598): n equals a,t,g, or c
  SITE (599): n equals a,t,g, or c
  SITE (600): n equals a,t,g, or c
  SITE (601): n equals a,t,g, or c
  SITE (602): n equals a,t,g, or c
  SITE (603): n equals a,t,g, or c
  SITE (604): n equals a,t,g, or c
  SITE (605): n equals a,t,g, or c
  SITE (606): n equals a,t,g, or c
  SITE (607): n equals a,t,g, or c
  SITE (608): n equals a,t,g, or c
  SITE (609): n equals a,t,g, or c
  SITE (610): n equals a,t,g, or c
  SITE (611): n equals a,t,g, or c
  SITE (612): n equals a,t,g, or c
  SITE (613): n equals a,t,g, or c
  SITE (614): n equals a,t,g, or c
  SITE (615): n equals a,t,g, or c
  SITE (616): n equals a,t,g, or c
  SITE (617): n equals a,t,g, or c
  SITE (618): n equals a,t,g, or c
  SITE (619): n equals a,t,g, or c
  SITE (620): n equals a,t,g, or c
  SITE (621): n equals a,t,g, or c
  SITE (622): n equals a,t,g, or c
  SITE (623): n equals a,t,g, or c
  SITE (624): n equals a,t,g, or c
  SITE (625): n equals a,t,g, or c
  SITE (626): n equals a,t,g, or c
  SITE (627): n equals a,t,g, or c
  SITE (628): n equals a,t,g, or c
  SITE (629): n equals a,t,g, or c
  SITE (630): n equals a,t,g, or c
  SITE (631): n equals a,t,g, or c
  SITE (632): n equals a,t,g, or c
  SITE (633): n equals a,t,g, or c
  SITE (634): n equals a,t,g, or c
  SITE (635): n equals a,t,g, or c
  SITE (636): n equals a,t,g, or c
  SITE (637): n equals a,t,g, or c
  SITE (638): n equals a,t,g, or c
  SITE (639): n equals a,t,g, or c
  SITE (640): n equals a,t,g, or c
  SITE (641): n equals a,t,g, or c
  SITE (642): n equals a,t,g, or c
  SITE (643): n equals a,t,g, or c
  SITE (644): n equals a,t,g, or c
  SITE (645): n equals a,t,g, or c
  SITE (646): n equals a,t,g, or c
  SITE (647): n equals a,t,g, or c
  SITE (648): n equals a,t,g, or c
  SITE (649): n equals a,t,g, or c
  SITE (650): n equals a,t,g, or c
  SITE (651): n equals a,t,g, or c
  SITE (652): n equals a,t,g, or c
  SITE (653): n equals a,t,g, or c
  SITE (654): n equals a,t,g, or c
  SITE (655): n equals a,t,g, or c
  SITE (656): n equals a,t,g, or c
  SITE (657): n equals a,t,g, or c
  SITE (658): n equals a,t,g, or c
  SITE (659): n equals a,t,g, or c
  SITE (660): n equals a,t,g, or c
  SITE (661): n equals a,t,g, or c
  SITE (662): n equals a,t,g, or c
  SITE (663): n equals a,t,g, or c
  SITE (664): n equals a,t,g, or c
  SITE (665): n equals a,t,g, or c
  SITE (666): n equals a,t,g, or c
  SITE (667): n equals a,t,g, or c
  SITE (668): n equals a,t,g, or c
  SITE (669): n equals a,t,g, or c
  SITE (670): n equals a,t,g, or c
  SITE (671): n equals a,t,g, or c
  SITE (672): n equals a,t,g, or c
  SITE (673): n equals a,t,g, or c
  SITE (674): n equals a,t,g, or c
  SITE (675): n equals a,t,g, or c
  SITE (676): n equals a,t,g, or c
  SITE (677): n equals a,t,g, or c
  SITE (678): n equals a,t,g, or c
  SITE (679): n equals a,t,g, or c
  SITE (680): n equals a,t,g, or c
  SITE (681): n equals a,t,g, or c
  SITE (682): n equals a,t,g, or c
  SITE (683): n equals a,t,g, or c
  SITE (684): n equals a,t,g, or c
  SITE (685): n equals a,t,g, or c
  SITE (686): n equals a,t,g, or c
  SITE (687): n equals a,t,g, or c
  SITE (688): n equals a,t,g, or c
  SITE (689): n equals a,t,g, or c
  SITE (690): n equals a,t,g, or c
  SITE (691): n equals a,t,g, or c
  SITE (692): n equals a,t,g, or c
  SITE (693): n equals a,t,g, or c
  SITE (694): n equals a,t,g, or c
  SITE (695): n equals a,t,g, or c
  SITE (696): n equals a,t,g, or c
  SITE (697): n equals a,t,g, or c
  SITE (698): n equals a,t,g, or c
  SITE (699): n equals a,t,g, or c
  SITE (700): n equals a,t,g, or c
  SITE (701): n equals a,t,g, or c
  SITE (702): n equals a,t,g, or c
  SITE (703): n equals a,t,g, or c
  SITE (704): n equals a,t,g, or c
  SITE (705): n equals a,t,g, or c
  SITE (706): n equals a,t,g, or c
  SITE (707): n equals a,t,g, or c
  SITE (708): n equals a,t,g, or c
  SITE (709): n equals a,t,g, or c
  SITE (710): n equals a,t,g, or c
  SITE (711): n equals a,t,g, or c
  SITE (712): n equals a,t,g, or c
  SITE (713): n equals a,t,g, or c
  SITE (714): n equals a,t,g, or c
  SITE (715): n equals a,t,g, or c
  SITE (716): n equals a,t,g, or c
  SITE (717): n equals a,t,g, or c
  SITE (718): n equals a,t,g, or c
  SITE (719): n equals a,t,g, or c
  SITE (720): n equals a,t,g, or c
  SITE (721): n equals a,t,g, or c
  SITE (722): n equals a,t,g, or c
  SITE (723): n equals a,t,g, or c
  SITE (724): n equals a,t,g, or c
  SITE (725): n equals a,t,g, or c
  SITE (726): n equals a,t,g, or c
  SITE (727): n equals a,t,g, or c
  SITE (728): n equals a,t,g, or c
  SITE (729): n equals a,t,g, or c
  SITE (730): n equals a,t,g, or c
  SITE (731): n equals a,t,g, or c
  SITE (732): n equals a,t,g, or c
  SITE (733): n equals a,t,g, or c
  SITE (734): n equals a,t,g, or c
  SITE (735): n equals a,t,g, or c
  SITE (736): n equals a,t,g, or c
  SITE (737): n equals a,t,g, or c
  SITE (738): n equals a,t,g, or c
  SITE (739): n equals a,t,g, or c
  SITE (740): n equals a,t,g, or c
  SITE (741): n equals a,t,g, or c
  SITE (742): n equals a,t,g, or c
  SITE (743): n equals a,t,g, or c
  SITE (744): n equals a,t,g, or c
  SITE (745): n equals a,t,g, or c
  SITE (746): n equals a,t,g, or c
  SITE (747): n equals a,t,g, or c
  SITE (748): n equals a,t,g, or c
  SITE (749): n equals a,t,g, or c
  SITE (750): n equals a,t,g, or c
  SITE (751): n equals a,t,g, or c
  SITE (752): n equals a,t,g, or c
  SITE (753): n equals a,t,g, or c
  SITE (754): n equals a,t,g, or c
  SITE (755): n equals a,t,g, or c
  SITE (756): n equals a,t,g, or c
  SITE (757): n equals a,t,g, or c
  SITE (758): n equals a,t,g, or c
  SITE (759): n equals a,t,g, or c
  SITE (760): n equals a,t,g, or c
  SITE (761): n equals a,t,g, or c
  SITE (762): n equals a,t,g, or c
  SITE (763): n equals a,t,g, or c
  SITE (764): n equals a,t,g, or c
  SITE (765): n equals a,t,g, or c
  SITE (766): n equals a,t,g, or c
  SITE (767): n equals a,t,g, or c
  SITE (768): n equals a,t,g, or c
  SITE (769): n equals a,t,g, or c
  SITE (770): n equals a,t,g, or c
  SITE (771): n equals a,t,g, or c
  SITE (772): n equals a,t,g, or c
  SITE (773): n equals a,t,g, or c
  SITE (774): n equals a,t,g, or c
  SITE (775): n equals a,t,g, or c
  SITE (776): n equals a,t,g, or c
  SITE (777): n equals a,t,g, or c
  SITE (778): n equals a,t,g, or c
  SITE (779): n equals a,t,g, or c
  SITE (780): n equals a,t,g, or c
  SITE (781): n equals a,t,g, or c
  SITE (782): n equals a,t,g, or c
  SITE (783): n equals a,t,g, or c
  SITE (784): n equals a,t,g, or c
  SITE (785): n equals a,t,g, or c
  SITE (786): n equals a,t,g, or c
  SITE (787): n equals a,t,g, or c
  SITE (788): n equals a,t,g, or c
  SITE (789): n equals a,t,g, or c
  SITE (790): n equals a,t,g, or c
  SITE (791): n equals a,t,g, or c
  SITE (792): n equals a,t,g, or c
  SITE (793): n equals a,t,g, or c
  SITE (794): n equals a,t,g, or c
  SITE (795): n equals a,t,g, or c
  SITE (796): n equals a,t,g, or c
  SITE (797): n equals a,t,g, or c
  SITE (798): n equals a,t,g, or c
  SITE (799): n equals a,t,g, or c
  SITE (800): n equals a,t,g, or c
  SITE (801): n equals a,t,g, or c
  SITE (802): n equals a,t,g, or c
  SITE (803): n equals a,t,g, or c
  SITE (804): n equals a,t,g, or c
  SITE (805): n equals a,t,g, or c
  SITE (806): n equals a,t,g, or c
  SITE (807): n equals a,t,g, or c
  SITE (808): n equals a,t,g, or c
  SITE (809): n equals a,t,g, or c
  SITE (810): n equals a,t,g, or c
  SITE (811): n equals a,t,g, or c
  SITE (812): n equals a,t,g, or c
  SITE (813): n equals a,t,g, or c
  SITE (814): n equals a,t,g, or c
  SITE (815): n equals a,t,g, or c
  SITE (816): n equals a,t,g, or c
  SITE (817): n equals a,t,g, or c
  SITE (818): n equals a,t,g, or c
  SITE (819): n equals a,t,g, or c
  SITE (820): n equals a,t,g, or c
  SITE (821): n equals a,t,g, or c
  SITE (822): n equals a,t,g, or c
  SITE (823): n equals a,t,g, or c
  SITE (824): n equals a,t,g, or c
  SITE (825): n equals a,t,g, or c
  SITE (826): n equals a,t,g, or c
  SITE (827): n equals a,t,g, or c
  SITE (828): n equals a,t,g, or c
  SITE (829): n equals a,t,g, or c
  SITE (830): n equals a,t,g, or c
  SITE (831): n equals a,t,g, or c
  SITE (832): n equals a,t,g, or c
  SITE (833): n equals a,t,g, or c
  SITE (834): n equals a,t,g, or c
  SITE (835): n equals a,t,g, or c
  SITE (836): n equals a,t,g, or c
  SITE (837): n equals a,t,g, or c
  SITE (838): n equals a,t,g, or c
  SITE (839): n equals a,t,g, or c
  SITE (840): n equals a,t,g, or c
  SITE (841): n equals a,t,g, or c
  SITE (842): n equals a,t,g, or c
  SITE (843): n equals a,t,g, or c
  SITE (844): n equals a,t,g, or c
  SITE (845): n equals a,t,g, or c
  SITE (846): n equals a,t,g, or c
  SITE (847): n equals a,t,g, or c
  SITE (848): n equals a,t,g, or c
  SITE (849): n equals a,t,g, or c
  SITE (850): n equals a,t,g, or c
  SITE (851): n equals a,t,g, or c
  SITE (852): n equals a,t,g, or c
  SITE (853): n equals a,t,g, or c
  SITE (854): n equals a,t,g, or c
  SITE (855): n equals a,t,g, or c
  SITE (856): n equals a,t,g, or c
  SITE (857): n equals a,t,g, or c
  SITE (858): n equals a,t,g, or c
  SITE (859): n equals a,t,g, or c
  SITE (860): n equals a,t,g, or c
  SITE (861): n equals a,t,g, or c
  SITE (862): n equals a,t,g, or c
  SITE (863): n equals a,t,g, or c
  SITE (864): n equals a,t,g, or c
  SITE (865): n equals a,t,g, or c
  SITE (866): n equals a,t,g, or c
  SITE (867): n equals a,t,g, or c
  SITE (868): n equals a,t,g, or c
  SITE (869): n equals a,t,g, or c
  SITE (870): n equals a,t,g, or c
  SITE (871): n equals a,t,g, or c
  SITE (872): n equals a,t,g, or c
  SITE (873): n equals a,t,g, or c
  SITE (874): n equals a,t,g, or c
  SITE (875): n equals a,t,g, or c
  SITE (876): n equals a,t,g, or c
  SITE (877): n equals a,t,g, or c
  SITE (878): n equals a,t,g, or c
  SITE (879): n equals a,t,g, or c
  SITE (880): n equals a,t,g, or c
  SITE (881): n equals a,t,g, or c
  SITE (882): n equals a,t,g, or c
  SITE (883): n equals a,t,g, or c
  SITE (884): n equals a,t,g, or c
  SITE (885): n equals a,t,g, or c
  SITE (886): n equals a,t,g, or c
  SITE (887): n equals a,t,g, or c
  SITE (888): n equals a,t,g, or c
  SITE (889): n equals a,t,g, or c
  SITE (890): n equals a,t,g, or c
  SITE (891): n equals a,t,g, or c
  SITE (892): n equals a,t,g, or c
  SITE (893): n equals a,t,g, or c
  SITE (894): n equals a,t,g, or c
  SITE (895): n equals a,t,g, or c
  SITE (896): n equals a,t,g, or c
  SITE (897): n equals a,t,g, or c
  SITE (898): n equals a,t,g, or c
  SITE (899): n equals a,t,g, or c
  SITE (900): n equals a,t,g, or c
  SITE (901): n equals a,t,g, or c
  SITE (902): n equals a,t,g, or c
  SITE (903): n equals a,t,g, or c
  SITE (904): n equals a,t,g, or c
  SITE (905): n equals a,t,g, or c
  SITE (906): n equals a,t,g, or c
  SITE (907): n equals a,t,g, or c
  SITE (908): n equals a,t,g, or c
  SITE (909): n equals a,t,g, or c
  SITE (910): n equals a,t,g, or c
  SITE (911): n equals a,t,g, or c
  SITE (912): n equals a,t,g, or c
  SITE (913): n equals a,t,g, or c
  SITE (914): n equals a,t,g, or c
  SITE (915): n equals a,t,g, or c
  SITE (916): n equals a,t,g, or c
  SITE (917): n equals a,t,g, or c
  SITE (918): n equals a,t,g, or c
  SITE (919): n equals a,t,g, or c
  SITE (920): n equals a,t,g, or c
  SITE (921): n equals a,t,g, or c
  SITE (922): n equals a,t,g, or c
  SITE (923): n equals a,t,g, or c
  SITE (924): n equals a,t,g, or c
  SITE (925): n equals a,t,g, or c
  SITE (926): n equals a,t,g, or c
  SITE (927): n equals a,t,g, or c
  SITE (928): n equals a,t,g, or c
  SITE (929): n equals a,t,g, or c
  SITE (930): n equals a,t,g, or c
  SITE (931): n equals a,t,g, or c
  SITE (932): n equals a,t,g, or c
  SITE (933): n equals a,t,g, or c
  SITE (934): n equals a,t,g, or c
  SITE (935): n equals a,t,g, or c
  SITE (936): n equals a,t,g, or c
  SITE (937): n equals a,t,g, or c
  SITE (938): n equals a,t,g, or c
  SITE (939): n equals a,t,g, or c
  SITE (940): n equals a,t,g, or c
  SITE (941): n equals a,t,g, or c
  SITE (942): n equals a,t,g, or c
  SITE (943): n equals a,t,g, or c
  SITE (944): n equals a,t,g, or c
  SITE (945): n equals a,t,g, or c
  SITE (946): n equals a,t,g, or c
  SITE (947): n equals a,t,g, or c
  SITE (948): n equals a,t,g, or c
  SITE (949): n equals a,t,g, or c
  SITE (950): n equals a,t,g, or c
  SITE (951): n equals a,t,g, or c
  SITE (952): n equals a,t,g, or c
  SITE (953): n equals a,t,g, or c
  SITE (954): n equals a,t,g, or c
  SITE (955): n equals a,t,g, or c
  SITE (956): n equals a,t,g, or c
  SITE (957): n equals a,t,g, or c
  SITE (958): n equals a,t,g, or c
  SITE (959): n equals a,t,g, or c
  SITE (960): n equals a,t,g, or c
  SITE (961): n equals a,t,g, or c
  SITE (962): n equals a,t,g, or c
  SITE (963): n equals a,t,g, or c
  SITE (964): n equals a,t,g, or c
  SITE (965): n equals a,t,g, or c
  SITE (966): n equals a,t,g, or c
  SITE (967): n equals a,t,g, or c
  SITE (968): n equals a,t,g, or c
  SITE (969): n equals a,t,g, or c
  SITE (970): n equals a,t,g, or c
  SITE (971): n equals a,t,g, or c
  SITE (972): n equals a,t,g, or c
  SITE (973): n equals a,t,g, or c
  SITE (974): n equals a,t,g, or c
  SITE (975): n equals a,t,g, or c
  SITE (976): n equals a,t,g, or c
  SITE (977): n equals a,t,g, or c
  SITE (978): n equals a,t,g, or c
  SITE (979): n equals a,t,g, or c
  SITE (980): n equals a,t,g, or c
  SITE (981): n equals a,t,g, or c
  SITE (982): n equals a,t,g, or c
  SITE (983): n equals a,t,g, or c
  SITE (984): n equals a,t,g, or c
  SITE (985): n equals a,t,g, or c
  SITE (986): n equals a,t,g, or c
  SITE (987): n equals a,t,g, or c
  SITE (988): n equals a,t,g, or c
  SITE (989): n equals a,t,g, or c
  SITE (990): n equals a,t,g, or c
  SITE (991): n equals a,t,g, or c
  SITE (992): n equals a,t,g, or c
  SITE (993): n equals a,t,g, or c
  SITE (994): n equals a,t,g, or c
  SITE (995): n equals a,t,g, or c
  SITE (996): n equals a,t,g, or c
  SITE (997): n equals a,t,g, or c
  SITE (998): n equals a,t,g, or c
  SITE (999): n equals a,t,g, or c
  SITE (1000): n equals a,t,g, or c
  SITE (1001): n equals a,t,g, or c
  SITE (1002): n equals a,t,g, or c
  SITE (1003): n equals a,t,g, or c
  SITE (1004): n equals a,t,g, or c
  SITE (1005): n equals a,t,g, or c
  SITE (1006): n equals a,t,g, or c
  SITE (1007): n equals a,t,g, or c
  SITE (1008): n equals a,t,g, or c
  SITE (1009): n equals a,t,g, or c
  SITE (1010): n equals a,t,g, or c
  SITE (1011): n equals a,t,g, or c
  SITE (1012): n equals a,t,g, or c
  SITE (1013): n equals a,t,g, or c
  SITE (1014): n equals a,t,g, or c
  SITE (1015): n equals a,t,g, or c
  SITE (1016): n equals a,t,g, or c
  SITE (1017): n equals a,t,g, or c
  SITE (1018): n equals a,t,g, or c
  SITE (1019): n equals a,t,g, or c
  SITE (1020): n equals a,t,g, or c
  SITE (1021): n equals a,t,g, or c
  SITE (1022): n equals a,t,g, or c
  SITE (1023): n equals a,t,g, or c
  SITE (1024): n equals a,t,g, or c
  SITE (1025): n equals a,t,g, or c
  SITE (1026): n equals a,t,g, or c
  SITE (1027): n equals a,t,g, or c
  SITE (1028): n equals a,t,g, or c
  SITE (1029): n equals a,t,g, or c
  SITE (1030): n equals a,t,g, or c
  SITE (1031): n equals a,t,g, or c
  SITE (1032): n equals a,t,g, or c
  SITE (1033): n equals a,t,g, or c
  SITE (1034): n equals a,t,g, or c
  SITE (1035): n equals a,t,g, or c
  SITE (1036): n equals a,t,g, or c
  SITE (1037): n equals a,t,g, or c
  SITE (1038): n equals a,t,g, or c
  SITE (1039): n equals a,t,g, or c
  SITE (1040): n equals a,t,g, or c
  SITE (1041): n equals a,t,g, or c
  SITE (1042): n equals a,t,g, or c
  SITE (1043): n equals a,t,g, or c
  SITE (1044): n equals a,t,g, or c
  SITE (1045): n equals a,t,g, or c
  SITE (1046): n equals a,t,g, or c
  SITE (1047): n equals a,t,g, or c
  SITE (1048): n equals a,t,g, or c
  SITE (1049): n equals a,t,g, or c
  SITE (1050): n equals a,t,g, or c
  SITE (1051): n equals a,t,g, or c
  SITE (1052): n equals a,t,g, or c
  SITE (1053): n equals a,t,g, or c
  SITE (1054): n equals a,t,g, or c
  SITE (1055): n equals a,t,g, or c
  SITE (1056): n equals a,t,g, or c
  SITE (1057): n equals a,t,g, or c
  SITE (1058): n equals a,t,g, or c
  SITE (1059): n equals a,t,g, or c
  SITE (1060): n equals a,t,g, or c
  SITE (1061): n equals a,t,g, or c
  SITE (1062): n equals a,t,g, or c
  SITE (1063): n equals a,t,g, or c
  SITE (1064): n equals a,t,g, or c
  SITE (1065): n equals a,t,g, or c
  SITE (1066): n equals a,t,g, or c
  SITE (1067): n equals a,t,g, or c
  SITE (1068): n equals a,t,g, or c
  SITE (1069): n equals a,t,g, or c
  SITE (1070): n equals a,t,g, or c
  SITE (1071): n equals a,t,g, or c
  SITE (1072): n equals a,t,g, or c
  SITE (1073): n equals a,t,g, or c
  SITE (1074): n equals a,t,g, or c
  SITE (1075): n equals a,t,g, or c
  SITE (1076): n equals a,t,g, or c
  SITE (1077): n equals a,t,g, or c
  SITE (1078): n equals a,t,g, or c
  SITE (1079): n equals a,t,g, or c
  SITE (1080): n equals a,t,g, or c
  SITE (1081): n equals a,t,g, or c
  SITE (1082): n equals a,t,g, or c
  SITE (1083): n equals a,t,g, or c
  SITE (1084): n equals a,t,g, or c
  SITE (1085): n equals a,t,g, or c
  SITE (1086): n equals a,t,g, or c
  SITE (1087): n equals a,t,g, or c
  SITE (1088): n equals a,t,g, or c
  SITE (1089): n equals a,t,g, or c
  SITE (1090): n equals a,t,g, or c
  SITE (1091): n equals a,t,g, or c
  SITE (1092): n equals a,t,g, or c
  SITE (1093): n equals a,t,g, or c
  SITE (1094): n equals a,t,g, or c
  SITE (1095): n equals a,t,g, or c
  SITE (1096): n equals a,t,g, or c
  SITE (1097): n equals a,t,g, or c
  SITE (1098): n equals a,t,g, or c
  SITE (1099): n equals a,t,g, or c
  SITE (1100): n equals a,t,g, or c
  SITE (1101): n equals a,t,g, or c
  SITE (1102): n equals a,t,g, or c
  SITE (1103): n equals a,t,g, or c
  SITE (1104): n equals a,t,g, or c
  SITE (1105): n equals a,t,g, or c
  SITE (1106): n equals a,t,g, or c
  SITE (1107): n equals a,t,g, or c
  SITE (1108): n equals a,t,g, or c
  SITE (1109): n equals a,t,g, or c
  SITE (1110): n equals a,t,g, or c
  SITE (1111): n equals a,t,g, or c
  SITE (1112): n equals a,t,g, or c
  SITE (1113): n equals a,t,g, or c
  SITE (1114): n equals a,t,g, or c
  SITE (1115): n equals a,t,g, or c
  SITE (1116): n equals a,t,g, or c
  SITE (1117): n equals a,t,g, or c
  SITE (1118): n equals a,t,g, or c
  SITE (1119): n equals a,t,g, or c
  SITE (1120): n equals a,t,g, or c
  SITE (1121): n equals a,t,g, or c
  SITE (1122): n equals a,t,g, or c
  SITE (1123): n equals a,t,g, or c
  SITE (1124): n equals a,t,g, or c
  SITE (1125): n equals a,t,g, or c
  SITE (1126): n equals a,t,g, or c
  SITE (1127): n equals a,t,g, or c
  SITE (1128): n equals a,t,g, or c
  SITE (1129): n equals a,t,g, or c
  SITE (1130): n equals a,t,g, or c
  SITE (1131): n equals a,t,g, or c
  SITE (1132): n equals a,t,g, or c
  SITE (1133): n equals a,t,g, or c
  SITE (1134): n equals a,t,g, or c
  SITE (1135): n equals a,t,g, or c
  SITE (1136): n equals a,t,g, or c
  SITE (1137): n equals a,t,g, or c
  SITE (1138): n equals a,t,g, or c
  SITE (1139): n equals a,t,g, or c
  SITE (1140): n equals a,t,g, or c
  SITE (1141): n equals a,t,g, or c
  SITE (1142): n equals a,t,g, or c
  SITE (1143): n equals a,t,g, or c
  SITE (1144): n equals a,t,g, or c
  SITE (1145): n equals a,t,g, or c
  SITE (1146): n equals a,t,g, or c
  SITE (1147): n equals a,t,g, or c
  SITE (1148): n equals a,t,g, or c
  SITE (1149): n equals a,t,g, or c
  SITE (1150): n equals a,t,g, or c
  SITE (1151): n equals a,t,g, or c
  SITE (1152): n equals a,t,g, or c
  SITE (1153): n equals a,t,g, or c
  SITE (1154): n equals a,t,g, or c
  SITE (1155): n equals a,t,g, or c
  SITE (1156): n equals a,t,g, or c
  SITE (1157): n equals a,t,g, or c
  SITE (1158): n equals a,t,g, or c
  SITE (1159): n equals a,t,g, or c
  SITE (1160): n equals a,t,g, or c
  SITE (1161): n equals a,t,g, or c
  SITE (1162): n equals a,t,g, or c
  SITE (1163): n equals a,t,g, or c
  SITE (1164): n equals a,t,g, or c
  SITE (1165): n equals a,t,g, or c
  SITE (1166): n equals a,t,g, or c
  SITE (1167): n equals a,t,g, or c
  SITE (1168): n equals a,t,g, or c
  SITE (1169): n equals a,t,g, or c
  SITE (1170): n equals a,t,g, or c
  SITE (1171): n equals a,t,g, or c
  SITE (1172): n equals a,t,g, or c
  SITE (1173): n equals a,t,g, or c
  SITE (1174): n equals a,t,g, or c
  SITE (1175): n equals a,t,g, or c
  SITE (1176): n equals a,t,g, or c
  SITE (1177): n equals a,t,g, or c
  SITE (1178): n equals a,t,g, or c
  SITE (1179): n equals a,t,g, or c
  SITE (1180): n equals a,t,g, or c
  SITE (1181): n equals a,t,g, or c
  SITE (1182): n equals a,t,g, or c
  SITE (1183): n equals a,t,g, or c
  SITE (1184): n equals a,t,g, or c
  SITE (1185): n equals a,t,g, or c
  SITE (1186): n equals a,t,g, or c
  SITE (1187): n equals a,t,g, or c
  SITE (1188): n equals a,t,g, or c
  SITE (1189): n equals a,t,g, or c
  SITE (1190): n equals a,t,g, or c
  SITE (1191): n equals a,t,g, or c
  SITE (1192): n equals a,t,g, or c
  SITE (1193): n equals a,t,g, or c
  SITE (1194): n equals a,t,g, or c
  SITE (1195): n equals a,t,g, or c
  SITE (1196): n equals a,t,g, or c
  SITE (1197): n equals a,t,g, or c
  SITE (1198): n equals a,t,g, or c
  SITE (1199): n equals a,t,g, or c
  SITE (1200): n equals a,t,g, or c
  SITE (1201): n equals a,t,g, or c
  SITE (1202): n equals a,t,g, or c
  SITE (1203): n equals a,t,g, or c
  SITE (1204): n equals a,t,g, or c
  SITE (1205): n equals a,t,g, or c
  SITE (1206): n equals a,t,g, or c
  SITE (1207): n equals a,t,g, or c
  SITE (1208): n equals a,t,g, or c
  SITE (1209): n equals a,t,g, or c
  SITE (1210): n equals a,t,g, or c
  SITE (1211): n equals a,t,g, or c
  SITE (1212): n equals a,t,g, or c
  SITE (1213): n equals a,t,g, or c
  SITE (1214): n equals a,t,g, or c
  SITE (1215): n equals a,t,g, or c
  SITE (1216): n equals a,t,g, or c
  SITE (1217): n equals a,t,g, or c
  SITE (1218): n equals a,t,g, or c
  SITE (1219): n equals a,t,g, or c
  SITE (1220): n equals a,t,g, or c
  SITE (1221): n equals a,t,g, or c
  SITE (1222): n equals a,t,g, or c
  SITE (1223): n equals a,t,g, or c
  SITE (1224): n equals a,t,g, or c
  SITE (1225): n equals a,t,g, or c
  SITE (1226): n equals a,t,g, or c
  SITE (1227): n equals a,t,g, or c
  SITE (1228): n equals a,t,g, or c
  SITE (1229): n equals a,t,g, or c
  SITE (1230): n equals a,t,g, or c
  SITE (1231): n equals a,t,g, or c
  SITE (1232): n equals a,t,g, or c
  SITE (1233): n equals a,t,g, or c
  SITE (1234): n equals a,t,g, or c
  SITE (1235): n equals a,t,g, or c
  SITE (1236): n equals a,t,g, or c
  SITE (1237): n equals a,t,g, or c
  SITE (1238): n equals a,t,g, or c
  SITE (1239): n equals a,t,g, or c
  SITE (1240): n equals a,t,g, or c
  SITE (1241): n equals a,t,g, or c
  SITE (1242): n equals a,t,g, or c
  SITE (1243): n equals a,t,g, or c
  SITE (1244): n equals a,t,g, or c
  SITE (1245): n equals a,t,g, or c
  SITE (1246): n equals a,t,g, or c
  SITE (1247): n equals a,t,g, or c
  SITE (1248): n equals a,t,g, or c
  SITE (1249): n equals a,t,g, or c
  SITE (1250): n equals a,t,g, or c
  SITE (1251): n equals a,t,g, or c
  SITE (1252): n equals a,t,g, or c
  SITE (1253): n equals a,t,g, or c
  SITE (1254): n equals a,t,g, or c
  SITE (1255): n equals a,t,g, or c
  SITE (1256): n equals a,t,g, or c
  SITE (1257): n equals a,t,g, or c
  SITE (1258): n equals a,t,g, or c
  SITE (1259): n equals a,t,g, or c
  SITE (1260): n equals a,t,g, or c
  SITE (1261): n equals a,t,g, or c
  SITE (1262): n equals a,t,g, or c
  SITE (1263): n equals a,t,g, or c
  SITE (1264): n equals a,t,g, or c
  SITE (1265): n equals a,t,g, or c
  SITE (1266): n equals a,t,g, or c
  SITE (1267): n equals a,t,g, or c
